United States Patent Application Publication US 2010/0034822 A1 - sequence listing, part 2

SEQ ID NO: 3707 - DNA, 1846458 bp, Haemophilus influenzae
  misc_feature (1)...(1846458): n is any nucleotide
gtgcatcggtgttgatatcgctgttgaagcgactggtttattcttaactgatgaaactgctcgtaaacacatcactgcaggcgcgaaaaaagttgtattaactggcccatctaaagatgcaacccctatgttcgttcgtggtgtaaatttcaacgcatacgcaggtcaagatatcgtttcgaacgcatcttgtacaacaaactgtttagctcctttagcacgtgttgttcatgaaactttcggtatcaaagatggtttaatgaccactgttcacgcaacaactgcaactcaaaaaactgtggatggtccatcagctaaagactggcgcggcggccgcggtgcatcacaaaacatcattccatcttcaacaggtgcagcgaaagcagtaggtaaagtattacctgcattaaacggtaaattaactggtatggctttccgtgttccaacgccaaacgtatctgttgttgatttaacagttaatcttgaaaaaccagcttcttatgatgcaatcaaacaagcaatcaaagatgcagcggaaggtaaaacgttcaatggcgaattaaaaggcgtattaggttacactgaagatgctgttgtttctactgacttcaacggttgtgctttaacttctatatttgatgcagaagcaggtatcgcattaacagattctttcgttaaattggtatcttggtacgataacgaaacgggttactcaaacaaagtattagacttagttgctcacgtttacaactacaaaggctaattaaaactttgaaaaaattaaccgctcttcggagcggttttttattatctagaatttagtttacgctctaaaaatgaacaagggatcactaaaaataacttaaaataatcaatattcttctagcttttattcctatttaagattatattagctcacaactgttcgctcaataaaaatcaaaaatagggttaatatgaatctcgatctccattttgttcatcgtattcaacaacaagccaaaactcgtgcaaatatgaccgcacttcgctataaagaacacggcttgtggagagacatttcttggaaaaattttcaagagcaactcaatcaactttctcgtgcattgcttgctcacaatattgacgtacaagataaaatcgccatttttgcccataatatggaacgttggacaatcgctgacattgcgaccttacaaattcgagcaatcacagtgcctatttacgcaaccaatacagcccagcaagcagaatttatcctaaatcacgccgatgtaaaaattctcttcgtcggcgatcaagagcaatacgatcaagcattggaaattgctcatcattgtccaaaattacaaaaaattgtggcaatgaaatccaccattcaattacaacaagatcctctttcttgcacttgggaaagttttattaaaacaggttcaaacgcccaacaagatgaactaacccaacgcttaaaccaaaaacaattatcggatttatttacgattatttatacctcaggcacaacgggagagcctaaaggtgtcatgttagattacgctaatctctctcaccaattagaaacacatgatctttcacttaatgtgacagatcaggatatttcactttcttttttaccattctctcatatttttgaacgggcatgggcggcttatattcttcatagaggcgcaatactttgctatttagaagacactaatcaagtgcggtcagctttaacggaaattcgcccaactttaatgtgcgccgtaccacgtttttacgaaaaaatttatgctgccgtattggataaagttcaaaaagccccaaaacttcgccaaattatgtttcattgggcaatttctgtaggacaaaaacattttgatttacgtgcgaataacaaagatattccgttcttattgaaaaaacaatttgctttggcagataaattagtgctctcaaaacttcgccaattattgggtggtcgtataaaaatgatgccttgcggaggagcaaaattagaacctgctattgggctatttttccatgctattggtatcaacatcaaattaggctatggtatgacagaaacaactgcaaccgtttcttgctggcataatttccaatttaacccaaattcaatcggcacactgatgccaaaagcggaagtgaaaattggggaaaataatgaaatccttgtgcgtggtggaatggtgatgaaaggctattacaaaaagccagaagaaacggctcaagccttcaccgaagatggtttcttaaaaactggtgatgcgggagagtttgacgaacaaggcaatttatttattaccgatcgtatcaaagaattaatgaaaacctcaaacggcaaatatatcgcaccacaatatatcgaaagcaaaatcggtaaagataaatttatcgaacaaattgcgatcatcgctgatgcgaaaaaatatgtatccgcacttattgtgccttgctttgatagtttggaagaatacgctaaacagctcaatattaaatatcatgaccgtttagaactactaaaaaattctgacattctgaaaatgtttgagcagcgtattaatgcggtacaaaaagaattggctcatttcgagcaagtaaaaaaattcacgctactttctcaagcattcagcattaaattaggcgaaattacaccaacattaaaattgcgtagaaaagtgattttagaacgttatcgcaagcaaattgaagcaatgtatcattcacaagaagcataactaaaaggctctcaattgagagcctttcttttctaattattcaggaaatttttcttctaaaatcaatgcaagtccatcttcattattggttgccgtaaccacatttgcagcttgtttaatttcatcaggcgcatttcccattgcaacaccaagccccgcatgttctagcatatccagatcattaaaattatcgccaaatgcaatcacttcattagtttgtacgccaaaataatcttccaaaaaacgcaccgcacttcctttggttgcactcttgtgcattacctctaaaaaattagcgtgggaacgacaaatacttaaatgtggaaattttttctttaaaagaacttcaatctcaatgatttcttctgcttccccaataatttgaattttatgtggcgaacttgtcgctacttcatcaaaaggatgaatctcaattttggtcactctgcgttcataaatcacccatttattttctacgtcacgagcatggcaatcattatttgtataataattcacgccaagcaacggatgatccgccaaaacggtattaatctctaaaatatcttttggctcaatttgtacgctataaattggttcgagattttggttcaaaataagcgcgccactaaatgcaacaagcacattattcgtttcaagctgtttccaataaggcaaaatacctagaggagaacgcgccgaaattggcacaaaaggaatgccattcgccgttaaacgcttaattaccgcaacagttcgaggggaaatggtatgttgagaggttaataaggtgccatcaaaatcactaaatactgctttatacatcattactccgaataaagattatttctctgctaaataaggatcatcaaagcctaatccttgcataatttgggtttctaaactttccatttcttccgcttcatcgtcttcaatatgatcataaccaagtaaatgtaaacaaccatgcacgaccatatgcgcccaatgtgccattaatggtttctcttgttctgcagcttctcgctccacgacttgacgacaaataacgagatcccctaacaatggcaactccacttcgtcagggcattcaaatggaaatgaaagcacgttagtcgggcgatcctttccacgataagttaaatttaattcatggctttcggcttcatccacaatacgcaccgtcatttcgacttcattcccttctggttgaatcgcagctgttgcccactgcacaatctgctcttctgttggcaaaccctctatattttctgtggcaatttgcaaatcaaccaatacacttcccattctattctcctaaattcttttcaatttctaaccgcacttttgcacttattgaatacatataacaaacgggtgggcttatgaccacttttgtatgtgtaaaaatgaggggaattatacaataataaacccaccaatcccctttacataatttatgtttaccgctaatttactctatttttaacatacaaagagacaaatcacgctatttccttaatcaacacaaaacctcaaatctctcgctcttagttggggttaattgtgaagtcgtagatgtccgctataaatatttccttttccttccctagcaaaaccaattaaagtcaaattatgtttttctgccattgttactgctaaatccgttgcggcagaaatcgtgactaacatttccaccccgcaagccactgttttttgcaccatttcataactcgctcgactggaggctaaaataaaacctctaggtttacccgattttgcgtgccaaccaagcaatttatctaatgcaacgtggcgacccacatcctcgtaaatagctaacatacttccatataaatcgaaaaatgcacaagcatgggtagcaccagttttacatccaagcaattgatttttttgaagatcaataagacaactatctagcaaatttaaatcaaattgaaaagtacagtctaatttcggaaaagttttatatacttgattcaattgttctgtaccacaaataccacaaccagtacgccccgtaagattacgacgatgctcttttaatgccataaatttacggctggaaagttcaatttgcacttcaataccattgcaaacttctacaacatcaataccataaatatcttctggtttattgataattccctctgttagagaaaaacctaaagcaaaatcctctaaattgtttggggaacacatcataactgcgtgagaaatgccgttatataccaaagaaactggtatctcaacagctagtatgtcctctttttgttgcaaaagtgcggtcaatttttctgtattttttgtctttctaaaaaagttgatagtttgtcgaatccagcactgcatttattacccgtccattagttaaatgtaaaaagtttgttaaattatttttatatttatgatctagatcacaatatttgttgaagctaatgtcatttgattatggatttattgttaaaaaatcgttactctagccatccaataaatcaacgtttttacgatgatttatatactagagagtgttattttaacgaaatcaacataatctagctactaaacgaattttattactatctataatatctcaacaacttgttgttgaaaggagtgattatgcagatctcaagaagaaaattcttcaagatctgtgcaggaggtatggcgggaacgtcagctgcaatgttgggctttgctccagcaaacgtattagctgcgccacgcgaatataaattattacgcgcgtttgaatcccgtaacacctgtacatattgcgctgtaagttgcggtatgttgttatatagcacaggcaaaccttacaattcattaagcagccatactggcacaaatactcgttcaaaactctttcatattgagggtgatccagatcatccagtcagtcgtggtgcgctttgcccgaaaggtgctggctcactcgattatgtcaatagtgaaagccgttctttatatcctcaatatcgtgcgcccggttctgataaatgggaacgaatttcttggaaagatgccattaaacgtattgctcgtttaatgaaagatgaccgagatgccaactttgttgaaaaagatgcaaatggaaaaacggttaatcgttgggcaacgacaggaattatgactgcatcagcaatgagcaatgaagctgcgttattaacacaaaagtggattagaatgctcggtatggtgccagtatgtaaccaagcgaatacttgacacggaccaacggtagcaagtcttgctccatcatttggtcgcggtgccatgacaaataactgggttgatattaaaaatgccaacttaatcatcgttcaaggcggtaaccctgcagaagcccatcctgttggcttccgttgggcaattgaagcgaagaaaaacggtgcgaaaatcatcgttattgatccgcgttttaaccgtacagcatccgttgctgatcttcatgcgccaattcgttctggttctgatattacgttcttaatgggcgtgatccgttacctattggaaacaaaccaaattcaacacgaatatgttaaacactataccaacgcatcattcttaattgatgaaggtttcaaatttgaagatggtttatttgtagggtataacgaagaaaaacgtaactacgataaatctaaatggaactaccaatttgatgaaaatggtcacgctaaacgtgatatgacattacaacatcctcgttgtgtcattaacatcttaaaagagcacgtttctcgttataccccagaaatggttgaacgtattacaggcgtaaaacaaaaactcttcttacaaatctgtgaagaaattggtaaaacctctgtgccaaataaaacgatgacgcatctatatgcattaggttttacagagcattcaatcggtacacaaaatattcgctcaatggcgataatccagttacttttaggtaatatggggatgccaggtggcggtattaacgcattacgtggacactccaatgtgcaaggtacgacagatatgggcttattgccaatgtctttaccaggttatatgcgtttgccaaacgataaagatacctcttacgatcaatacattaacgcaattacaccaaaagatatcgttccaaaccaagtgaactattatcgtcatacttcaaaattctttgttagtatgatgaaaactttctacggagataatgccactaaggaaaatggctggggattcgatttcttaccaaaagcagatcgcctatatgatccaattactcacgttaaattgatgaatgaaggcaaattacacggttggattttacaaggttttaacgtattaaattcactaccaaataaaaataaaacgttatctggtatgagtaaactgaaatacttagtcgttatggatccattacaaactgaatcatcagaattttggaaaaattttggtgagtcaaatgatgtaaatcctgcagaaattcaaacagaagttttccgtttaccaactacttgttttgcagaagaagaaggatcaatcgttaattctggtcgctggactcaatggcactggaaaggttgcgatcaaccgggagaagccttacctgatgttgatattctttctatgctacgcgaagaaatgcacgaactttataaaaaagagggtggacaaggaattgaatcttttgaagcgatgacttggaattatgctcaaccacactcaccaagtgcggttgaattagccaaagaattaaatggttatgcgcttgaagatctttatgatccaaacggtaacttgatgtacaagaaaggtcaattactcaatggatttgcacatttacgtgatgatggtacaacaacatcaggtaactggttatatgttggtcaatggactgaaaaaggcaaccaaactgctaatcgcgataattcagatccatcgggtttaggttgtactattggctggggctttgcatggcctgcaaaccgccgtgtactttatagccgtgcatcattagatatcaatggtaatccttgggataaaaaccgccaattaatcaaatggaacggtaaaaactggaactggtttgatattgctgactacggtacgcaaccaccaggttctgatactgggccgttcattatgtccgcagaaggcgtaggacgtttatttgccgttgataaaattgcaaatggcccaatgccagaacactatgaaccagttgaaagtccaattgatacaaacccatttcatccaaatgtagtaactgatccaactttacgtatctataaagaagatcgtgaatttattggttcaaataaagagtatccatttgtagcaacaacttatcgtttaaccgagcatttccacagctggactgcacaatctgcattaaatatcatcgcacaaccacaacaatttgtggaaattggcgaaaaattagcggcagaaaaaggcattcaaaaaggcgatatggtaaaaattacttctcgtcgtggctatattaaagcggttgccgtggttacaaaacgtcttaaagatctcgaaattgatggacgtgtcgtacaccatataggtcttccaattcactggaatatgaaggcattaaatggcaaaggtaaccgtggtttctctacgaataccttaacaccatcttggggtgaggcaatcacgcaaacaccagaatacaaaacattcttggtaaatattgaaaaagttggggaggcataatatggctggaactgctcaaggcgttcaaacgcaagacgttattaaaatctccgcaacatctggtttaacaccagcaccacaagcgagagatcataaagttgaagtcgcaaaattaattgatgtttcaacttgtataggatgtaaagcctgtcaagtgggttgttcagagtggaatgatattcgctctgatatcaatgcacaatgtgttggggtttatgacaatccagttgatcttgatgcaaaagcatggacggtgatgcgttttaacgaagttgaagaaaacgatcgtttagaatggctgattcgtaaagatggctgtatgcactgcacagaacctggttgtttaaaggcttgtcctgcacccggtgcaatcattcaatatgctaacggtattgtagatttccaatccgataaatgtattggttgtggttattgtattgcaggctgcccattcaatattccacgaatgaatcctgaagacaatcgtgtatacaaatgtactctttgtgtggatcgtgtttctgtgggacaagagccagcttgcgtgaaaacctgtccaacaggtgctattcgtttcggttctaaagaagaaatgaaaatttacgcagaacaacgcgtggcagatttaaaatcccgtggttatgaaaacgcaggactttacgatcctccaggtgtaggcggtacacacgtaatgtatgtgttgcatcacgcagataaacctgagctttacaatggtcttccaaaagatcctcaaattgatttgagtgtgaccttatggaaagatgtattgaaaccagtcgctgcagttgcaatgggtggtctagctctagcagaagttgcgcactacttaaccgttggcccaaatgtagaagaagatgtggaagatcatcatcacgaatttgaagaaaataaatcatctaagggggaaaataatgagtaaaattgaaattagcaacgatactcgcgttatccgccatagaaccccagctcgtatcagtcactggatgttggttatttgcttttttatgacgatgttcactggtgttgcatttttcttccctgactttgcttggctcacagaaattttgggtacaccacaaattgcgcgcgccattcatccattcacagggattttaatgttcttcgctttcatctacttagcgttattgtactgggatcacaatattccagaaaaaaacgatattcgctgggcaaaaggtgttattgaagttcttaaagggaatgaacacgcggttgctgataatggcaaatataaccttggtcaaaaaatgctcttttggacattaaacttggcaatggtaacgttattagtcactggcatcattatgtggcgtcaatatttttcacattacttctcaatcccagtattgcgaattgctattttactccactctgcaagtgcttttatgttattcactggtatcttagtgcatatatatatggcattttgggttaaaggatcaattcgcggtattgttgaaggttgggtaaccgttcgttgggcgaaaaaacaccacccaagatggtatcgtgaagaagttttatcaaaacttgaggaagatttactcaacgagcaatctggcaaagtaggtaaaaccaaagtcttatttaaaggatttggcaaataagctgaaatcctgaaaaagaaaaagtgcggttaaaattgaccgcactttttattataaaagtgagagaatatgagtatcaaaatcttatctgaatcagaaattaaacaagtagcaaattcatatcaagccccagcggttttatttgccaatcctaaaaatctttaccaacgcagagcgaaacgtttaagagatttagcacaaaatcatcctctatctgattatttattattcgctgcagacatagttgaaagccaactttccacgttagaaaaaaatcctttaccgccacaacagcttgaacagttaaatgctatcgagccactaaatgccaaaacctttaagagagacagtatttggcgtgaatacttaactgaaattcttgatgaaataaaacccaaagctaacgagcaaattgctgcaacaattgaatttcttgaaaaagcctcttctgctgaattagaagaaatggcaaataagctcttagcacaagaatttaatttagtcagcagtgataaagccgtctttatttgggctgcactttccctttattggttacaagcagctcaacaaattccccataatagccaagtcgaaaacgccgaaaatttacatcactgccctgtttgtggttctttacctgtggcaagtatggtacaaattggtacatcgcaaggtttacgctacttacattgtaatttatgtgaaagtgaatggaatttagtacgcgcacaatgcaccaattgtaatagtcatgacaaactcgaaatgtggtcactaaatgaagaacttgcgcttgttcgtgccgaaacctgtggtagctgtgaaagttacttgaaaattatgttccaagaaaaagatccttacgtagaactagtagccgatgatttggcttctattttcttagatattgaaatggaagaaaaaggtttcgcccgaagtggattaaatccatttatttttcctgcagaagaagcataaaaatatagcctagaaatatctaggctaattatttaaatctatagataatacgccattaccactgcattttctcgtccaccactgggtttaggataataatttttccgaatatccacttcattaaaaccaattttttcatacaagaaacgagctgggttagactctctgacttctaaccataaggtctggacacctttttctttcaatcgagcgattaactcattcaacaataattttccgaatccgcaaccttgataagtaggaaaaatcgcaatattaaacaaagtcgcttcatctaatacggtttggcaaatagcaaaaccgataatctgattattctctattaattttaaattgagataacgctcaccttgattattttttaacgtaccaaatgaccaaggcaccagatgggcttgctgctcgatttcatacaatcgctcgaaatcacaggcttcaatttgagaaataatagacataattaaggctgctgaatttgttgccacaacgctcgtttggcttgatgattagattgaaattgctgccaacttggcgagcgataaacctgctcagcctgcttgcaaaatggcaaagtgcggtcaatttggtcgttattttctgatagtaaccagtaacgaataggctgcttacattccatatgctggatttgatcgtaattcaaacataaacaattttcttttttaagattaaggcttaacagcacatcagctaacaaaggcgagctactgatattttcatcggaaacagtgataaagcgaatattctctgccacactaattcctactgaaccttgcagtacctcggggcgatataattcccactgggaaatgcctatttcttgtaaaagaagatcgcgtctgttcataagtgaatttttaaaaacgttgcttgaaaaatagtgttaatttcttttattaatctttgctaaaatgacgcgtaattttaaccaataacccacaggattcaaagcgtgatttctctagaaagccaagttttagaacgccatatttcattttttgatggtaaatcggtattatttgctggcggtatttctgatagttttcctcaaacattagcctcaaaatgcccatcaatccaaatttggagttgctattttgactatgcaagaacgcaaagtgcggtcaatttttccgttgaatttcaaggtcaagccgatttaatcgtttattattggactaaaaacaaacaagaagtcaatttccaactgcttcaactattagctcaagcatctattggtcaagaaatattaattattggtgaaaaccgttgtggcgtgcgttcagtagaaaaaacattatcaccctatggagaaatagcaaaaattgattctgctcgtcgttgcggtttatatcatttttcactccaaaataaaccgcactttgaacttaaaaatttctggagaacctatcaacattcaacacttgaaaacttaactatatatagtttacctggggtatttagtgcggcggaattagacacaggcacagaactgttactttcaaccattgataataaaataaaaggaaaagtgcttgatcttggctgtggcgctggggtaattggctctatgataaaaaaacgtgcgcctaacgcacaaattacaatgacagatattcacgcaatggcattagagtcagcgcgtaaaacactttctgaaaatcaattacaaggcgaggtttacgccagtgatgtcttttctgatatagaagaaaaatttgatttgatcatttctaatcctccattccacgatggcattgataccgcctatcgagcagtgacagaactcatcactcaagcaaaatggcatctcaatcaaggtggagaattacgtattgtcgccaatgcatttttgccttatcccgaattacttagacaacatttcggtgattacgaagtgcttgctcaaacaggaaaatttaaagtgtattcagtgaaaaattagaaacaaaaaaatccccatcacaataatggggatttttattatgcgtataaattttaccgcactttattcatccatatatcctaaactacgcagcgcacgttcatcatctgcccaaccagatttcacttttacccaaagttcaagatggactttgttatcaaataatcgttccatatcaacacgtgcttccataccaatagttttaattttttgaccgcccgcaccaatgaccatttttttctgaccttcacgttcaacgagaattaagccatttatttcataagtgccacgttcatttactttgaattgttcgatttcaaccgtaacagaataaggcaattcttcacccgtaaaacgcattaatttttcacggattatttccgatgccataaaacgttgagaacggtctgtaacataatcttctggaaaatgatgcacaccttcacgtaaagattggcgtacaattttttctaattcatgaacattattaccacgctgtgcagaaattggcacaatgtgagcaaagttaaatttactgctaagacctgtaataaacggcaataaatcatctttattcttgatgttatctactttgttgatagcaagcacaacgggtgcttttgcattacgtagtttgtttagcaccatctcatcatctgcattccagtgtgtaccatctacgacaaaaataattaaatcaacatcgccgatagcactacttgcggcgcggttcattaagcggttaatcgcccgtttttcttcaatatgaagccccggtgtatccacgtagatttcttgatacgcaccttcagttttaatcccaacaatgcggtgacgggtggtttgtgctttacgcgatgtaattgaaattttttgtcctaaaattttatttaagagcgttgatttacccacatttgggcgacctacgatagcaataaagccgcaataggttttgtcgaattgtccggtcatttgatgtccagttcttttaaaatttgttctgctgccgcttgttcagctttacgacggctagatccttttgccacaaaagtgcggtcaattttccccgcacttttcactttgcattcaacagtgaaaatttggcaatgggcttccccttgaatattgaccacttcataagttggcaatggcaaatgtttgccttgtaaatattcttgtaaacgcgttttcgcatctttttgattatcgcctggtttaatttctgccaataattgttgataccaatttcgtatcacttgggtcgtcacagccaatccttgatccaaagacattgcgccaataatcgcttctacacaatcggcaagaatagattcgcggcgaaaaccaccgttctttagctcgccagaaccaagcgacatataatcgcctaattcaaattggcgcgctaaaatcgctaaagtgggttcgcgtaccaaagtagcacgcatacggctcagttctccttcattacaacgtggaaactgatgataaagtgcttcagcgatagtgaaattaagaatggaatcgcctaggaattctaggcgttcattatgttgagttgccgcacttctatgcgtaagtgcctgctttaagagcgtaatatcattaaaacaatagccgattttacgctcaagtcgatctaaatgattcatcttattttattgctgtaaagaaacgctcaaaacggaaacctgttggccattcattcgcttctttttctaagctcatccaaatataagtggctttccccacaatatttttttcaggcacaaagccccagaaacggctatcatcgctgtgatcgcgatgatcccccatcacaaaatactgcccctctggcacaagccattctgcagtttgcattccctcttgtgggaaaaattcaaggtctgaataacgacgatactcactaattaacacgttatgtgttacatcgcctttttcagtcaattctaattcattcggaaaagcaggatttgttggattttgtgtatattcaaacgccttagtttcacaatcaatttcacaaggtttaccttctttgccatataccacttttagcgttttttgttccgcatcaaaaatgatgcgatctccgccctttccaacaatacgcttaatataatccacaccagacatattatcttttgaacttaacgctaaattttctgcaaaagccgctcgtgttgcaccaagaccagtacgaattaacgcttgttgtggtgctttaaacacaatcacatcgccacgttgtggtttttcgcctgcaataatggtgttttggaaaatcggatctttcacaccataagcatatttattcacaactaaaaaatcgccaacgcgtaaagtggactccattgagccagagggaatttgaaacggttcaaacaaaaaagaacgaaccaaaaataccactgcaagcacaggaaaaagtgaagacaaaaattctgaagcctcagaaatcggttcaattttggctttttcttcctcacttaaggttttaccagaacgttgttctgcacgtgccacttgacgatgacgttttggcaacaccacaaaacgatgataacaccataatacgccagaaagtgcggtcaaaattagtaacaaaatactaaaagtatttggtaactgaaaataatctaaaactttccacacaccaaaaccgacagccaataaaatcacaaaaaataaatttgacataattttccttatttatcttttcctacgtgtaaaattgctaaaaacgcctcttgcggcacttctacgttacctaaagacttcatacgttttttcccttctttctgcttctgtaagagttttttcttacggctcacgtcaccaccataacattttgctaatacgtttttacgtaattgtttcaccgtagaacgagcaataatatggttaccaatcgcggcttgaatagcaatatcaaattgctgacgaggaattaactcacgcattttttcaaccaattcacgaccacgatattgtgaattatctttatgaacgattaaagccaacgcatccactcgttcgctgttaatcataatatccacgcgaaccatatctgccgcttggaaacgtttaaaaccgtaatctaacgaagcataaccacgcgatgtcgattttaaacgatcaaagaaatctaaaaccacttcgcccattggaatttcataagtcagcgtaatctgattaccgtgatataccatattggtttgcacgccacgtttttccacgcaaagggtaatgacgttacctaaatattcttgcggcactaacatattacattctgcgattggctcgcgaatttcagcaatattattaagtggaggcaattttgcaggactatccacataaaccacttcaccattggtcatttcaacttcataaattacagttggtgctgtggtaatcaaatcaagatcgtattcacgctctagacgctcttgaatgatttccatatgcagaagtccaaggaaaccacaacggaaaccaaaaccaagcgcggtcgaagtttctggttcatagaaaagtgacgcatcgtttaaacttaatttgccaagcgcatcgcgaaacgcttcataatcatcagaacttacagggaaaagcccagcataaacctgtggttttacttttttaaagcctggcaacacttcagttgcagaattatgttgatgggttaaggtatcgcccactggcgcacctaaaatatctttaatcgcacaaactacccaacccacttcgccacattctaaaacggtagtatcttcttgttttggcgtaaaaatccctaaacgatctacgttgtaagtttgccctgtggacatcactttaattttatcgcctttacgtaataccccgtttttaatacgcactaaagataccacgcccaaataattatcgaaccaagaatcaatgatcaatgcttgtaatggcgcattaggatcgccttctggtgcaggaatttttgccacgatttcttctaatacatcttcgataccgacacccgttttagctgagcatcgaaccgcttccatcgcatcaattccaacaatatcttcaatttcttcagcgacgcgttcaggatcagcagctggtaagtcgattttatttaaaatcggtactacttctaaatccatttcgattgcagtataacagtttgctagagtttgggcttctaccccttgaccagcatcaactaccaacaatgccccttcacaagcagcaagagagcgagatacctcataggaaaagtccacatgtcctggcgtatcgataaagtttaattgataagtttcgccatctttggctttataatttaaagtcacactttgtgctttgatggtaattccacgctcacgctcaagatccattgaatctagcacttgcgcttccatttcacgatccgaaaggccaccacaagtttgaatcaaacggtcagaaagtgtcgatttaccgtggtcaatatgggcaataatagaaaagttgcgaatattcttcataaaagattgtttttctcaaaaatcattaaatttaactggcggattgtacctgaaaagcgcggaaatcgctagggatgaaagggaaaagtgcggtcaaattttcaaactttttagataaaacaaaaccccgaataacttcggggtttcttttttcattcaaactgaaattataggctttcagtgaaagtacgagtgatcacgtcgcgttgttgttctggcgttaaagagttgaaacgtactgcgtaaccagaaacacggatagttaattgtggatatttatctggattgtttaccgcatcttctaacgtttcacgacgtaatacgtttacgtttaagtgttggccaccttcaactttaacagttggcgctacgtttactggtaattcacggtattcgatttgacctaattcgctaactgcaacaacttggtcttcagcgaattcgccttttgcacataagcaacgtgcttcatttttttcgctgtctaataaccagaatgaattaagcaaattgtcatttgccgcttgagtaatttgaatacctttaatcataatagcctcctaattggcacgaaaataataataataataataaaactgtacaaattttatcaaatcattttaatatttcaaattattttagatttatttgataaagagcaggttattttttaattaatttttataaatttgatctaaattaaaatttattaatttttaaataaaatttatatcaataatttaacattaatttaactttttattgaatgaatgtttttgtttataatgaataaaaacttattaataggataaaataatgaaaaactggacagacgttatcggaacagaaaaagcgcaaccttactttcaacacgcactacaacaggttcatcttgcaagagcaagcgggaaaacgatttatcccccacaagaagatgtatttaacgcattcaaatataccgcttttgaagatgtaaaagtggtgattttaggtcaggatccttatcatggaccaaaccaagctcatggattggctttttcagtaaaacctgaagtagccattcccccttccctattaaatatatataaagaactcacacaagatatttcgggatttcaaatgccatcaaatggttatttagtcaaatgggcagaacaaggggtattgctacttaacactgtgcttaccgtggaacgaggtatggcacattcacacgccaatttaggttgggaaaggtttacagataaagttattgcagtactcaatgaacatcgtgaaaaactggtgtttttactttggggcagtcacgcacaaaaaaaagggcaaattattgaccgcactcgtcactttgttttaacggcgccacacccttccccgttgtcagcacatcgaggtttctttggttgtcatcatttttccaaaacaaattcatatttggaaagcaatggaatgaaaccaattgattggcaaatctaaaccatatctctaaaaaaataaccgcactttaatctctcaaagtgcggttaaatatttcagtattttaattagccgtgataacgccctacgcctaattcatcttctttacgtgtgcgattcatcacttcttgtggagattgcgcaatacgtaatcccatttcatcttcagtacgcaccacttcgccacgtaacgaattagtataaacatcagtgattttcacatccacaaacttaccgatcatttctggagaaccttggaaattaacaatacgatttgtttcagtgcgtcctgttaattccataatatctttcttcgatgggccttcaactaacacgcgctgctctgtgccaagcatacgacggctaaattgtgccgcttgttgattaatacgctcttgtagcacataaagacgctgtttcttttcatcttccgtcacatcatctggcatatctgctgctggcgtacctggtcgggcggaataaacaaaactgaagctcatatcaaagtttacttgtgcaatcaaattcatagtttgctcaaaatcttccgccgtttcccctgggaaaccaacaataaagtcagagctgatttgaatatctgggcgcactgcacgaagtttacgaataatggatttatattctaatgcggtatgagcacgtttcatcattgttaatacacggtcagaacctgcttgcactggaagatgtaagaaactcactaattcaggcgtatcacgatatacatcaataatatcatcggtaaattctattggatgactggttgtgaaacgtaaacggtcaataccatcaattgatgcgacaagacgaagcaactcagcaaagctgcaaatttgaccatcatgcgttggcccacgataagcatttacattttgaccaagtagatttacctcacgcacaccttgttccgcaagttgcgcaatttcaaataacacatcatctacgggacggctaacttcttctccacgagtataaggcacaacacagaaagtacaatatttattacagccttccataatcgaaacaaatgccgttggaccttctgcgcgaggttcaggtaagcggtcaaatttctcaatttcaggaaagctcacatcaaccacagagcttttaccgccacgaatttgattaatcatttcaggcaagcgatgcaaagtttgtgggccaaaaataatatccacataaggcgcacgatggcgaatatgttccccttcttgagaagccacacagccgcccacgccaatcactaaatttggattatttttctttaattctttccaacgcccaagttggtggaacactttttcttgtgctttttcacgaatagaacaggtatttaataataatacgtctgcttcttcaggtgcttccgtgagttctaatccgtgggtgcttaataaaagatcagccattttagatgaatcatattcattcatctggcagccccaagttttaatatgtaatttttgagtcattttctacaatatcgttaggtgttataaataattagttaaataaagcgatgggctattctacaggcttacgataattctggctagtgaatattcggtgaaagacactaaacagaatattttgataagctagaaaggcttgtaaatcattaaaaaaataagatattcataaatatactcaagatataatgcagtatgaggtaaatattagttcataaaattaaaggaaatactagcttatcgcgattacaacgatgtgtatattcaaggtaaaccaaaaggattaagccctgtagattacaggacttaatccttaaattaaatagagctcactttttagtgaaagcgcaagcatatatttataatcaactactttgtctactacaccctcaaaatagcagttaaatttaaaaaagattagcttataaccagcctaaactcattaataatttccaccatgccataccgatagttagatggataattaaactaccaaaagcaatgatcgcgccagtaatccaccaagattttatatcattataacctgcaccgaatgcaattggacctggtccgcctccgtagtgagttactgaaccaccataagaattagcaaagactaagcctagagcaagcaattcagtaggagcgcctgttacatgtccgactgttgcaaatacgggtaccattgcagctacatatgcaccgcctgatgcgaataaataacgtacagagacacttaaggtaagaatcactattaacgccatcataccatgtccctcaaactgaagtatggtacttaaggtgtttgctaaccatttgaaaaagccagatttttcaagcaagccagacataccgatgataccaccataccatactagggtattccatgcgcctttgctttttaggatatcgtcccaggtgacgatacttaatacaatacaaagcaccattacaatgattgcaacaatggtagcattgatatgaagtgaattagagaaaatccagccgaataatgcaattacgaataacacgctgagtgctttttcacgaaaagacattggacctaattcttctaagccttttttcgcaatagctttattatccacttttttcaattctggtggagatacccaataacaaattaacggaattaagaataagcagagtaagccgggtacggatgcagctaagaaccatttgatccaagtggtttcaaaaccaagaattggtgccattaatgaaagagctaaggcattaggagccattgcggttaagaaaatataagaggtagttttaaccaccatatatacgttcatcatcaaataacgccctgcttttttcgggcttttttctggatctgaaccaagagcaaccactacgctattaatgattggaaagataatcccacctgaacgcgcggtgttagagggcgttgctggcgagagtaaaagatctaagaacatggtaacatagcctaagcgtagggttgtgctacccattgcgccgatcatatgataggcgatacgtttacctagacctgtgattacaaatgctgaactcaaagtgaatgcggtaaaaataagccatgttgtgccagatttataaccatccaacatattgccgactttaaccaattctttcgccccttcagtattaccgatgataacgccagaaaccgcaattgcagccaataagataacgggctcgccataaggtttaagcacaagcccaacgatagtggcgatataaacaccaagtaatcgccaagcaatcaaagaaagcccatcaggagcaggtagtaagaaagtgatcaatgggatagccattaaaatcaccagttttgtatttttggataatgccatattaattacctctaaatgataaaaagaaaattgttagtgctaataaatcagcactaccgcccgaacttaaattacgttcaatgcaggcggtatcaaatttcattaatgcttgtgtcagtgctgttttatctgtcacaaggcgttgatctgtaagcagatcctgtgctgtttgctgtatgaaatgtaatcccgctaaaccacctcgatgaaccacgttagtgtcggagttaattgccattaaattcaataacaaaatcagtaaacgatgttcccattctaactgatggtactcatcaaattgtggcaacaacgtttgaatgagattaaaaccattttctgcttcgccacggacacctgttaagccatatttttggaataaacgcactccagccgtactaggcaagtgttcaggataatttttcagttcatccgttaaaccttgagtaaattgtgcaacaagtgagcagattaatttaacatcaaaatctaccgcactttgaaccaaacttttttgtgccaataatcgtccaattgccgtacacactaaaccaaaagaaaaaatagctcctttgtgggtgtttacgccatcagtaactttaaacattgctttttctgctaataaacctaaaggacgaatttcagagagaatttgattttcagacaaatgcgcggtcatcatgcctttgagaacaaactgcgtaaaaaaaggttttaaactaatcgcactttgctcaaaagtatgtaggttcatatctttgtgcgaaccgttattgatggcatccactaaaccaggttttggcgataagcgagcctcttgtattaatgccagataaacttgttcaccaatatgttctgcgaaatcatgattctgtgcgagagattgaattttatctacaatctcatcaatctcgtgcttgcgggttctcgcacagatttttgcattttctccgcacactaaacaagttcttggagaaagatcaaaatctgtacgactcagtagattgcctttagcattaaacacatctaaatcccacaaacgagcaagaggaatactttcttccaattcaatcatcagcacttttagcgtacgagcatctatcggtactacaaaataggcttcatgccccgtttctaacggacggactatttcttttactgctgtgatgtttaactgagtaaaaagtgcggtcagattctctagagcttttgtaaaaacataatccaacaaagcatttttttttacgccacccacagcagttaaagtgatgcaaagtaaggtttgtccatattgtgttataagctgttgttgtaaaattgcacgttcctctcgagcattaagcaatgcttcaagtgaaatttttgaaccctctgtagagaatgtcgtaaaaaaatgctgcaaaatttgaccgctcttttgtataaaaataaattttcttaactctttccatttatatggtgctggcgaaagctgaaagagctaatcgagtccctttcaactctttgggctcctttcctgataatcatgggaagacaagagttaattttggctattgaaagtagatcgcttgtaatgctgattctagtctttaacttgatacaccgtatcaatcaccgaaccatcacgataacgaacaacagccacaggtttattagtaaactcaatttcttttggtttaccagtaatgctgtaagcacgttcacaaagttgttcaatagtaaacaatggaatgtctgttttgcttaaagcttcaatcaaatctggacgtttaggatttactgctacaccatgatcggtaacgagaatatcgacgttttcaccaggtgttacacaggtaatcacgttttccaccacggttggaatacgaccacgaactaatggtgccacaatgattgctacttgtgcagaagctgcggtatcacaatgaccaccagatgcaccgcgaatcacaccgtcagagccagtcaatacattcacgttaaatttagtgtcgatttctaaagcagaaagaatcaccatatctaaacgttcaacagatgcgcctttggaactgtaattcgcatattggttagcggagacttcaatatgatttgggttacgggcaagtgattcagctgcaacagaatcaaagctttgtacatctaataattttttaataagaccagcctcatgtaatgccaccatacttgcagtaattccgccaagtgcgaaatctgcagtgatattttcacgacgcattttttcttctagaaagcgtgtaacagctaatgctgcccccccagaaccagtttgtaatgagaagccatctttaaaataaccactggcaaaaattacttctgcacatttacgcgcaatgagtaattcgcgtggattggtagtcattcgggttgcaccaccaccaatttttttcgggtcaccgactgcttcaacttgcacgattaaatctacttgatcttgagctatgctgattgggtggtgcgggtattcaacaaattcctctgtgagcaacacaactttgtcagcatattcagcatcgacacgcgcatagcctagagagccgcatttactttttccagtaaatccattggcattaccgaatgtgtcacagcaaggcacgcctaaaaaagcaacgtcaatttttaattctccagattttactaagtgaacacgtccaccatgagaatgaatatttacaggttcattcaataaaccgcgagagatttgctctgcaagttcaccgcgtaaaccagaagaatagattttggtgaccacgccatttttgatatgttcgacaatcgggaagtggctatcaattaaagatgaagatgcaagggtcagatttttgaaacccatttcggcaattttattcatcaccatattcaccacaaaatctccgccccgaaaagcatgatgaaatgaaacagtcataccatcttttaagccagagcgtttaatcgcttcttctagagaggtacaaagtttgcgatctttcgctgtacgagaaagggattcagatttaggcacctcttgatagactgagcgatcagcgtgatatttttcaatacgttgttctcttgttgtcatctttttatctccctttactcttcacgaatacctgatttcgcacgttctaatacaagttttgcgcgatcaataatcggtgcgtcaatcattttaccgtttaacgaaacaacaccagccccttgtcgttcagcttctgctgccgcttcaataatgcgttttgcctgctccacatctttttgtgtcggtgcaaataagttgtgtaacaattcaatttggcgtgggttgattaaggatttaccgtcaaaaccaagctgtttaattaacgcagcctcttttaagaagccttcttcattgttcgcgttagaatatacggtatcaaaagcctgaatgccagccgcacgtgccgcttgtaaaatagaacaacgagcaaaaagcagttcaatcccctctggtgaacgctcggtttttaagttacgtacgtaatcctctgcacccaatgcgataccaattaaacgtttagaagcgaaagcgatttggttggcttgagtgatacctaatggcgattcgatggcggctagcattttagtcgaacctgcttctcgaccgcaagctttctcaatctcagtaatggcgtgatccatatccaacacatcttgcgcgctttcagtttttggcatacgtaccacatccacacccgcacgcactaccgaatccaaatccaataaaccaaattcagaatctagcggattaacacgaactacggtctcaatttctttataaagcggatgttgaagtgcatgagcgactaataaacgagcagaatctttttctttgagagcaaccgcatcttctaagtcaaacataatggaatctggtttataaataaagctattacttaacatggcggcatttgagcccggcacaaataacatacttcttcttaatttcatagcacagcctcccagttaatcgtttcatcagttgcacgcattgcagcagcttttactcgagcttgtaacacgcaatctaacgcccctttgtcttctacaatgacttgtgctgctgtaatgcctagttttgctaatacttcacgaactgtcgcttcaatttgttcaccaaattgttttgctactgagctattgatttcaatatcgagtgaatcaaaaggttgaacccgtacttgaacatcactggattccagtgtccctgcaacggctacttttgttattttcatagattttccttccgtatattgatgaataaaaatgtatttaaaaacgaccgcacttttgtaaataatttaacgtagtcataggcacaaactctgcgagttgagcccaatttttttcagccaaatgctttcgtactgtagaagcagaaataatgtggttgcttgctgtttttctaggtatctcaataacatttatttttggtgcattcatttcggcatccattaaccaataatgcatttggcgattatattcggcagtgacgggacaatttagctcagtaccaacaaagcgatgtgttattcccaaagcttgagcaatatgtaaacggaataacttcagatcaatctcaaaataactttcatctgtaattaattgatcttttaggaaataatttggaaatgttgcacgagaaataatatagtcagagccagaatgaagagtgatattggataaatcgaaaataccttgtttaatcatttcaaatcgttcagtgtaagaaaattgcgatgcgtcttcaccgacaataaataaatgcagatgatcacattgttgtaatgcttgctcaattaaataacgatgacctaaggtaaatggattcgcgttcattacaatcgagccaattcgattaccatccacacgcattttctcccataatgagcattgtttgtgtaaacgcgtagcactattttctaacaatactacataaggattggcatcagagatgatataaaaaccacaagatttgaacaacgttgcatattcgggttttgtataaataaaaaggtgtgggcgttttagcgtgtaagctaaatcaaccaattcagtaattaattgcaaggcaacaccgctaccacgcaaagactcatcaatcgcaacacattttatgatattgcctgctaaaccgccacagacaacgatttgttcgttatcattataaccaacaacaaaatactcgatttgttcatctaatttaagcgcattttgatgtaaaaatgtctgaatgagagaaagttttttttgttcagtagaaattcgctcaaattgcatcgactctccaaaaaagaagaaaacataacatcactaccaagttagtagtatagagctattataagcgatgagcaaattacgatacaagataagctcatatttttcccaactttataatctaatattatcttcacactgcattatacattgaataatttataggcaatattggcggttattctgagttgtaaaaataaaccgcacttttgttgcaagcaaaaagtgcggtttaattcagcgcagttttaaattatttcactaatccgccactggcttgtaaatcagcgtggtaagaagagcgaacaaatggcccacaagccgcatgttcaaagcccatttcattggctttatcacggaattcatcaaattcagttggcggcacataacgggcaacaggcaaatgatggcggctaggttgaagatattgacccaacgtgagcatagtcacaccgttatcacgtaaatcttgcatcacttgcaaaatttcctcgttggtttcgcctaacccaaccattaaaccagatttggttgggatatttgggaatatttctttgaattcacgcaataatttaagtgaccattcgtaatccgcacctggacgaatttctttatataagcgcggtacgttttctaaattatggttaaagacatctggcggattatcttttaatttctctaaagcctgtgtaatacgaccacgaaaatcaggcactaaaatttcaatcttaatgttaggattaagctcgcgcacagcttttacacattctgcaaaatgaccagcaccacgatcaggcaagtcatcacgatccaccgatgtgattaccacatatttaagtttcatatcttgaatcgtttctgccaatttttgtggctcttcaggatcaggcggtaatggtttaccgtgagccacatcacagaatgggcagcggcgcgtgcaaattgcacctaaaatcataaaagtggctgtgccatgattaaaacattcgtgtaaatttggacaagatgcttcctcacaaacagaatgtaacccgtgacggcgcattccatttttaatgctttcaattttagctgaacttgctggaagtttaattttcatccattctggtttttttaataactcttgattaggatcgatattttttacgggaataattgaggtttttgccgcatcgcgatattttacaccgcgttccattttgaaaggcgtagacatagtattttcctaaataaaaatgcccaaattgggcatttagtttttataaaatgttataaagttgttatattatagcctaaaagatcggcgaagtgtttaattaattttgctgaaacattatcgcaatcagcttcatcttgattaacaaaatccgctaactgacacatttcaagccctgcataaccacaaggattaatacaatggaaaggattaagatccatattaatattcaatgccaacccgtgaaaagagcaaccacgacgaatacgtaatccaagagaacaaatcttttttccatccacataaacacctggcgcatcaggctttggatagctttcaatgccatattcagtcaaagttttaaccaccgtttgttcaagtgcggtaactaattgacgtacatttaaatttttatggcgtttaatgtcaataagcacatacatcacttgctgaccaggtgcgtgataggtaatttgcccaccacgatccgattgcaccacagggatttcactacgttgtaaaagatgctctggtttacctgcttgcccttgtgtaaaaacaggataatgttgtactaaccaaatttcgtcttgcgtttcagcatttcgagtatcagtaaaatcctgcattttgtgccaaatttcttgataatcttgcaatcctaactgacgaacgataagggaattgttcatactaaataaccattttcacgccttcaactttagccagttctttatagagtgtttctacctgatcaaagttttcagcaataatatcaattgaaactgaattataagtgcctttactactgcgcttttcttttggaatataatcgcctttaatatatttttgcaccacttgtataagatcttgtgctaacccttctcgattaattcccgcaactttaaaagtcatttttgctggaaattccattaattccttgagttttgcataatcgttttctattgtcattttctttcctaaaaataaaataaatcaaaaagtgcggtcaattttcaacttgtttttatgaaaataaccctttcacagtcaatactaaccaatcccatagtttaccaaaaatacccgcttctcccacatcattcatcacttgtaaattggcacttgcaatatccttaccatccagttgataaaccactttaccaatcacttgaccttttgctaatggtgcttgtaaatttttatctgctaattcataacgagctttaacctcactttgtttacctttaggtatcgtaataaagtgatccatgaaagcaccaagttttactgaatttttatcgccataataaaccctttgttctgaaatttctttaccagcctctaaagttttaaatgtttcgaaattagcaaaaccccattgtaaaagtttcttactttctacttcacgacctttgtaagttggcacacccattactacagaaattaaacgcatattgtttgatgtagtcgctgaagcgactaagttatatcctgcttggctagtatgccctgtcttcattccatcaacattgatagttttatcccataatagtccattacggttaggttgtttgattttattaaatgtaaagtctttttcggagtaaattttatattcttcaggtaaatcacgaataatatgtgcaccaataattgccatatcacgcgcggaagaatattgatttggatcgtctaaaccatggggcgtggtgaaattggtatttttcaaaccaaattgttgaacatatttattcattgtttctacaaagttcggtacattgccagaaatatgttcagctaatgcaacagtcgcatcattaccagaaacaacaatcacacctcgatttaagtctgctacagatacttgtgtatttaaatctaaaaacatttttgatgaatcagggaaattacgcccccacgcactttcaccaatggtaaccatatcggtattatggattttgccttgttttaatgcgacaccaactacataacttgtcatcattttagtcagtgatgctggatattgacgttgatctggattaagtgcggtcaaaattgcgcctgaattataatccatcaatacatacgtttgagccgtaatttgtggtggagttacgccaaactgcatatcctctgcagatacggaaaaactgctaagtgtcacaaaacttgataaaaatgcgatttttgttgttcttttcaacataagatcttcctacaattaatttttatatgtgtaaacaattagtggcttattatttgccattttttgtaatttggttctcacttgtgccatttgtgctttattatcaaaaggcccaatataaatttcatatttatttcctgccctattcacttcagtctgaatattcgctaacgcaagttgcgtaattaatttatttgcttggctacgagaggttaattcaagcattttcaaacggtaaaattcggttccttttagagcatttattgacttagatgcgttatcaaaaagtgtgttagattttaatactaaacgatcgacagcttcctgagtttttgcttgtttagccagtgtttttgtggctgcgcctgataaattcccatttttagcaacgtgcaacgcctcaattcttacctgccctatgccacgggaaattaagccaatttcttttgccgcagcgtgtgaaagatcaattaaacgtttatcactaaaaggcccacgatcattaatacgtacgataactttacgattgttatgtaaatttgtcactaaagcataagaatttattggcaatgttttatgtgctgcagtaaattgttttgagttataaacatcgccacttgctgttttgcgcccatcaaatttaagatgataataacttgctaaaccttctttaatataaaatttggcttcattcccacttttagtggtataagtttgcccttttactgaataagtccttggcgcaggcatttgagttgcgatagaaagattatcccctcgaataccatacattttttgcgtatcagcctgcgcaggaaaagctacgcttatcataaatagcaaaagtgcggtcaaatttaacccagtttttaatttcataaaatattaacgcttttcatttattctttctttaagaaagaaaaaaatgaaattagctccttttcataaattgacttttatgcgtatgaatagacatcagtaaaccaaaacttgccataatcgcaacataagaggtaccaccataactaaataaaggtaatggcacacccacaacaggcaaaattccgcttaccattccaatattcacaaatacataaacaaagaaaattaatgttgttgcaccagcaagaatacgcccaaaagaagtttgagcatttacggcaatcattaaacctcgcacaataataaacaagtaaatcgccattaaaatcaaaaaaccaatcattccgtgctcttcacccattaccgcaaaaataaaatctgtatgaggttcgggcaaaaattctaattgtgattgagtcccctgcatccagccttttccgcttaatccaccagaaccaatcgcaatctttgattgtaaaatatgatagccagcaccgagaggatctttttctgggtccaataatgtgagaacgcgagtgcgttgataatcgtgcattagatataaccacatgatcggaataaatccagctaagccaatcactgccgctaaaataagccaccagctcattcctgctaaaaacacgacaaataaacctgacgcactgaccaaaattgctgtgcctaaatcaggctgaatcgccacaagcaatgttggcagtagaatcattgcaatcgctataaatgtttcacttaatttaggtggaagcgggcgattacctaaatacaccgccaccattaatggcacagcaagttttacaatttcagagggttgaaaacgaataaatccaagatcaagccaacgctgcgcacctttacttgtcgtaccaataacatctaccaagatcaataacacaaaaccaattaaataaagataaggtgcgatgcgttggtaaaatcttggtggaaattgagccattaacagcataacaataaatccaagtaagacctgaataattcggctattaaacatcgtttcactggcacctgatgcactatataacaccagcataccataagcagttattgcaagaagcccgataaacagccaaaaatcaatatgcaaacgttgccaaacacgcaaccaaaaagggattttatcttccatttatttgctcgctctcttgtggtaaatcttctttttgctgaatggttgcattatatttttcaacttgtggtaaacgctgatttaaatagtaatccatcactttacgcgctaacggtgcggcattacttgaaccaccacccgcattttctaaaatcactgttacaactaatttaggattatcataaggggcataagcggtaaaccaagcgtgatcatgcaattctttttttaagcctgccgtattatatttttcattttcctttaaactaaacacttgtgcagtgccagatttccctgcaacacgataatttgcatctgcaaaggcttttcgcccagttccatttgcagcattaacaacattgtacataccgcgtttcgctgcctcccaagctgccactttaggtgtgttaatatcaggataaagtaacggatcttcataaggctctaatactgcaccttcaattgctttcatcaaatgcggtgtatttactttgccattattgaccaatattgtcgtcgcttttgctacttgtagtggtgttgccgtccaataaccttgaccaatcccaaccgaaatcgtatcaccttgcacccaagggcgtttataacgtttttgtttccattctcgagttggtatattggcagccgtttcttcttgaatttcaatccccgttggcataccaaaaccaaaatccttcatccaattagaaaggcgatcaatacccatattataagccacttgataaaaataagtatcagaggattcagtaatcgctttatccaaatccgtatctccgtggcctgtttttttccaatcacgaaaacgttttgtggagttaggtaatacccaatatcccggatcaaaaatcgttgtgtttggtgtaatcacattttcagtttgtgcggctactgcaataaaaggtttgactgttgaagcgggcggatacgcaccttgtgtcgcacgactataaagcggacgagcaggatcatttaataaacgtttataatcttcggaggaaataccatcaacaaacaaattattgtcataacttggtgtagataccatcgctaatacactactatctttcggatcaagcacaactacagcaccttttagtcccgataaaagttcagtaatataacgctgtaatgccaaatcaatagttaaatgaatactttttcccgccacagcaggtcggctacgcaaagtacggattactttaccgcgattattaatttctacttcttcaaaacccgtggtaccttgcagtatatcctcgtaataacgttcaatacccaattttccaatatcgttcgtccccgcataattcgcaaatttatcctctcgtttcaaacgttctacatctttatcattcattttacctacatatcccaaaatatgcgccattgtttcgccatataaataatggcgtttgaaataaggacgtacctctaaactcgggtattggtagccatttaccgcaaagcgtgaaatttgttcttctgttaaattcggctttaataaaatcggtgtataacgcgttccgcggcgacgttcctttttaaaattttcaatatcattatccgtcaatcccacaatatagcgtaattcatctaaagtgcggtctaaattttcagttttttctggcacaatgtataaaccaaaaaaagtcaggttctcagctaataattttccgtaacgatcatagattaagccacgcgttggcggtaaaggtaataatttaattcggttaccattagaacgcgtttggtaagtattgaaattaacaatctgtagctgataaatattggtaaataacacccctgttagtaacaaaatccccaaaaaagccactaaagttcggcgtgcaaaaaggttacgctccgcttttttatcacggaacggctcatgagttggcgtattgaaaaatttttttaaattcatctggctaaaaataagaatgtattattctcgatgataaggatgattagtagtgagcgaccacgcgcgatacaaactttcagccactacaacacgaacaagtggatgaggtaatgtcaatggcgaaagcgaccaactttgctctgcagcggctttacattctggcgaaagcccctcaggcccaccaatcaacaaacaaacatcgcgaccatcatttttccacgcttctaattgctcggctaactgcggtgtcgtccaaggtttaccaggaatatctaacgtcacgactttgccttttccacaggcagctaacatcgccttaccttcttgctctaaaatacgtttaatatcagcattttttccacgcttacctgctgggatttcaatcagttcaaaaggcatatcttttgggaaacggcgttgatattcctcaaaacccgttgtaacccaagaaggcatttttgttccaacagcaattaacgtgattttcacaagtcatccttatctaaaaagtgcggttatttttcaccgcactttactaaaatttacgcccaaagtttctctaattgatacatttcacgcgcatcacgttgcataatatgtacgatagcttgaccaagatccaccacaatccaatctgcagtatttttaccttcttcgccaaaggtttcaaaacctgcttttttacattctgtgattaaattatctgccattgcagaaacttggcggctcgatgtacccgtgcaaataatcatattatccgtaatcgatgattttccacgtacatcaaaatgtacaatatctgttccctttaacccttctaaggtttccatcaaaaattcaactaacgccattttgttctcacttcgcaataaaagtgcggaattctatcattgaataccctcttgcgcaaaatccacgcaaaaaataagcgcgaaattaaccgcgctttttatgtctaaattgaaattatttttactatgctgcccataataacactgccaataactgtggcgacattattcgcaagaacatcactaacggatacacagtggcataagaaagtgctgcagcaccgttatcttctttaatttcattagcaaatgctaaagcgggaggatccgtcattgaacctgcaagtaaaccacagattgtaaggtaattcagtttgccatatagacgagccaaaataccagtaatcattaatggaataaaggtgataaaaataccgtatcccatccattcaagaccagagccattcaacaaggtatcaaagaaacttccgcctgattttaaaccgaccacagccaagaaaagaacaatcccaatttcgcgtaacgccaagttagcactaggcggcataaaccagtaaagtttaccaatcgtgccaattctcgctaagatcaacgcaaccaccaatggcccaccagcaagccctaattttaacgcaacagggaaacctggaatgtagaatggaatcgaaccaacgagtacccctaaaccaatgccgataaacacaggtaacatttgcacttgaagcaatttttgttgtgcattaccaatgactgaaatagcctgatttagtacatcactgcgtccgaccatatgtaacacatcgccaaattgcagtgtggtatttcccgttggaactaactcaatccctgcacgatttaaacgtgaaatcacaaccccatatttttgatgaatgcctaaggcacggatctttttgcctaatactttttcattcgttaccaccacacgctcagaacgaatttcgccactataggcaacagttggtgcatcaacttcgtgtccgataattaaacgcattttggcaagcgaattatcatcgcccactaattgcaaaatatcgttgatacgaatttcagtacttgcctttggaacaatttccatatcatcgcgttttaaacgtgaacatacgacttcttcatcactaaatccaggaatttgaattaacgtcagaccatctaaattttggttcgtcacttttaaagaaatattatgtaaactttctttatcttgactgctctccgcattaaaacgtgccgcttcatcatccactttgactttaaaaaacaagcggattaaccacattgcaagcaaaataccgcaaataccgaatggataagccattgcataagacatccccatagttacagtggtttgcggcacacctaattctgctaaaatttgttgtccagcccccaacgcaggcgtattagtaacagcaccagaataaatacctaaggcaatatcaagtggaacatccgcaattttacgtacaagaaccacggcaattgaacccagcacaataatcaaaatggcaaaggcatttagctttaaaccagattttcgtaaagaagaaaaaaagcccggcccaacctgaataccaatagtataaacaaataaaattaaaccaaattcttgcacaaaatgcagcgtatgggcatccagtttcaagccatattgattagtgaaatgggcaacaataatgccaccaaacagcacgccaccaatgccaagcccaaccccacggatcttccaatgcccgatccataagccgattacggcgacgagggcaagaaggctaatcgtgatcgcaatatcactcatattgaccccttaaaaatgaaatttaactcttttggattatagccaaattgtttttctaaaaccttaatcaaactcaaaaaatgctacattcgtcacattttttcttgcgaaattgagcatagactctacaataccgaaaattttgacccttttacaaaaagtgcggttatttttcaccgcacttttagctcggatggaatatttatggattacagccaagaagccattacttctcttatttggattttacaaacgctagccatcacctcagtcgtctttagttttggcatttttcttttggtgcgttttactcaatggggaagacaattttggatgtttgcaggtggttatctttctcctaaacgtagtataaaacctatcttattctttcttctcattgttgcaatgacgctacttagcgtacgtatcagccttgtacattctgagtggtacaaaaatatgtacacatcattacaagaatttaatgaacatgtattttggcaacaaatgggcttgttctgtgtcattgccgcaagttctgtttcagcagcattagtaagctattatttagagcaacgtttcgtcatcaactggattgaatggcttaacgaacagcttgttgataaatggatggcacatcgtgcctattacaaaacacaatatttatcagaaaatcttgataaccccgatcaacgtattcaacaagatgtgcaatcttatgtaaaaaccacgctttctttaagcactggtgtcattgatgcggtaacctctatgatctcttatacgattttattatggggattagcaggtccaatgatggtacttggcgtggaaattccgcatatgatggtatttttagtgtttggttatgtcatcttcacaaccctcatcgcattttggctcggtcgtccattaatatccttgaattttattaatgaacgcctaaacgcaaactatcgttattctttaattcgaataaaagaatatgccgaaagcattgctttttatgcgggcgaaaaagtcgaaaaaaatcagctttatcagcagttcaatgccgtcattcataatatgtggattattgtatttagaacactaaaattttcaggatttaacttagtcgtaagccaaatttccgtggtttttccattgttaattcaagttggacgttactttgaaaaacaaataaaacttggcgatctaatgcaaaccttacaagtatttggtcagttacacgcaaatctttccttcttccgcaatacttatgataattttgcaagctataaagcaacgctcgatcgtttaactgggttcagttatgccattgaaaaagtaaataataaatcacaaacacagatccacaatcatccaacagatgtgattttcaaaaatttaagtattcaaaatccattaggtcatacactaattaaacatctaaacattaccttaccgcaaggaacaagtttacttattcaaggaaaatctggggcaggaaaaaccacgcttttacgcaccattgcggggctttggagctacgcagagggggaaataaattgccctacgcacagtcagcttttcttgtcacaaaagccgtatgtgccacaaggaaatttaatgttagcattagcttatccaaataacgctgacaatatttcacatacgcaagcgatagaaatattaaataaagtgcaactagggcatttaactgaacaattagaaaaagaacaagactggacacgtattctttctcttggcgaacaacaacgtttggcgtttgcacgattaattctacacaaaccaacggtggcatttttagatgaagccacagcaagtatggatgaaggattagaatttgcgatgtatcaattgttacaacaagaactaccacaaacgacgatcatcagtgtgggacaccgttcaaccctaaaaaccttacatcaacaacaattaattctgcaagacaaagggcaatggcaagtgctataaaaaacgctaaaaaacactgtaatcgcaacgctttttttgatacatttagtgcaattttttgtctgtttgacaaagtcattttctactttttgtcaaacaaaactaactttcattttaaacggaataattatgttatttaaaaaaattcgtgggttgttttcaaacgatctttctattgatttaggcacagctaatactttaatttatgtcaaaagacagggtattgtacttgatgaaccctctgttgttgcgattcgtcaagatcgcgtaggcacattaaaaagcattgcagctgtgggtaaagaagccaaattaatgttaggtcgtactccaaaaagtattgtcgcaattcgtccgatgaaagatggcgttattgcagacttttttgtgacagaaaaaatgttgcaatactttatcaaacaagttcatagcggtaattttatgcgtccaagcccacgtgtattagtatgtgtgccagctggtgcaacacaagtagaacgtcgtgcaattaaagaatcagcaatcggtgctggcgcgcgagaagtatatttaattgaagagccaatggcagcggcaattggggctaaattacccgtttctaccgccgttggctcaatggtaattgacatcggtggtggtacgacagaagtggctgtaatttccttaaatggaatcgtgtattcttcttcggttcgtatcggtggtgaccgttttgatgaagcaattatttcttatgttcgccgcacttttggctcggttatcggagaacctacagccgaacgcatcaaacaagaaattggttctgcttatattcaagaaggtgacgaaattaaagaaatggaagtacacggacataatttagccgaaggtgcaccacgttcatttactttaacatcacgtgatgttctagaagctattcaacaaccattaaacggtattgtggcagctgttcgaaccgcgcttgaggaatgccaaccagaacacgcagcagacattttcgaacgaggtatggtcttaactggcggcggtgctttattacgtaatattgatattttactttctaaagaatctggtgtccctgttatcatcgcagaagatccattaacctgtgttgctcgtggtggtggcgaagcattagaaatgatcgatatgcacggcggcgatatttttagtgatgaaatttaattagaatatgaacaaaaagtgcggttaaaaataaccgcacttttcctttcatttttttcattcaacaagagaacgtttaatgaaacccatttttagcaaagcccctcccctaggcattcgtttacttatcgctatctttgcatctattgccctaattttagctgatggacgtaataactcaataacgaaagcacgtagtgcaatggaaacggcaataggcggtttatattatcttgcaaatagtcctcgaagcatcttagatggtgtttcagaaaatcttgttgataccaataaattacaaattgaaaacaaagtactacgccaacagcttttggaaaaaaatgcagatttacttttacttgatcaactcaaagtcgaaaatcagcgattacgtcttttattaaattctccgttaagaactgatgaatacaaaaaaattgccgaagttcttactgcagaaacagatatttatcgccaacaaattgtgattaatcaaggggaaaaagacggtgcttatgtaggtcagcctatcattgatgaaaaaggcgtcattggacaaattatttccgtgggcgaaaatactagccgagtactgctactcacagacgtaacacattcaattccagtgcaagttctacgcaatgatgttcgtgtcattgcaagtgggactgggcataccgatgaactaagcctcgataacgtgcctcgttctgtggatatcgaaaaaggcgacttactcgtaacctctgggcttggcggacgttttcttgaaggctatcccgtagctgttgtacaaagcgtttcgcgtgatagctctaattactttgcaatagttaaagctaaacctttagctttattagaacgtttacgttacgtacttttactttggccaagtaacctagatatatcaaaagtaaaatcaatatcgccagaagaagttcgcaatctggtgcaaaaacgtttagaaagccaagctaatgaagcaaattatagagtgaaaaaaacacccttaacagaagaagactttccagaaaataaagaaaaaaccattattgaaccagatattccaacagatttccttcaaaatgaagaagatcttcccatagaacagcaagaagaaaggatagaagactaatgcaaacacgatttattttacaatggttcactattttaagcttctttgttattgcctttgtattagaacttgcaccttggccagttggtttccaaatgctaaagcctgcgtggcttgtacttgtattactttattggatattagcaattcccaataaagtgagtataggctggtcatttttactcggattaacttgggatttagtattaggctctacattaggcgttcacgctctcgtactttctacgagtatgtatatcattgccaaaaactatttaattctgcgaaatttatcactttggttccaaagtttattggttgtacttttcgtcttcattataagattacttattttcttagttgaattttcactccatactgctttttttcattggcaagccatcttgggcgcattcgcttctggtttactatggccgtgggtatttttattaatgcgaaaaatacgcagaaaagttaaattacattaaaaaagagagataaatatctctcttttttatgacgtacgagtatctcaaacaactaattcaactgcttgttcgcatccattaaagaatcacattcccaacccatatactctcccgaaaattgttcagccaatttttcaaaacgttctacttgctcaaaaatttcgctattttctaatgaaatttcttgctctaattttaccaagaaataaggttcgtcatcttcattaaactgaatcgcttgtgcagaatattgtaatgttgtgaaagaataatcccctaaactcagttcatccataaaagggaacattttctgctcttcatcaaaatgaaaactatgctctactaaataggtatcacttaaattacgacctttactttttaataaatcaagcaattcttccgttgcatttaacttaatctctaatggagaagcaagcaaaaagtcaaaataagtatcccaaattaaatccttttgaacattaatatctttaacaaaatcaatttgttgtaaagtttctacaataagattttcgtgcttacaataaaaatgtatttttatttgagaattacaaataaaatgccccgcaaaaaatacatttggaagtgcggtgagttgtgtcaaaattttaaatacacggttaattaacttatcgtattcaacttctgagggtaaaccagtttcatcatcagcctgataatcaatagtaaactgcactattttatcgagacctttaccgtgatatttttcaacatcttcaatatttgcggtaaacacggcaggcataccgttcacggtagaacgataattctgccaatttgccatatccatttcgctttcctatttaaattcagcccaaatcggtgcgtgatcagacggtttttccattgctcgaatatctaatgcaatgcccacatcgacacatcgttcagccaatttttggcttactaaaatatgatcaattcgtaaacctcgattatcatcaaaacctttagaacggtaatcaaaccacgagaatttatcatttgctgttggatttagcttacggaaactatcttctaatccgtaatcatacaaacgttgataccacgctcgttcttctggtaagaaagaacatttacctgtgcgtaaccaacgtttacgattttcatcgccgataccaatatctaaatcactcgggctaatattcatatcgcccataattaaaatcggattagatttatcgtgttctttttctaaatactgttgaagatctgcataaaatttctctttagctggaaatttagtctcgtgcgtacgactttccccttgagggaaatagccattaatgacagtcaataagccaaattcagtttcaagatcagccataataatgcgtttttgcgcatcttcattgtctgttggaaaaccgcaacgaaccgctttaggttcttgtttagtcaataatgccacaccataatgacctttctgtccgtgatgaaatacgtgataacctaagttttctgtaatttcataaggaaaagcctcatcagcaactttaatttcctgcaagccgataacatctggctgatatttttcaataatggcttcaagttgatgtggtctagcacgtaaaccatttatattaaaagagataaatttcatttttgttcctgttaaagagtgaaattggctttattatacagagatttctattttgataaaaacggctttgtcagataaacctgaatttgctcaaatactgtaggcttaagccaaaattgaccttgagaaggtaaacaagtgaccgaaataaaattatttagataatcaaattccaattgagtagcgtgcaaataagtgcggtcaattttttctgtgtttttaccataaagcccatcgcctaaaatcgggctacctaaacttttcatcgcaacacgtaattgatgtgttttccccgtttgtggttttaaaataaataaacgtaaattaggttcacagcttacactttcaaaacgcgtaattgctggattttctttggtttgacaaagtttccatgcgccttctcgagctttcttcatatccccgataatcaaaccttgtttctttttaggcttttggttacttaatgccaaataagttttatgaattttatgttcagaaaaaagtcgtgaaaattcagccgcactttcagcatttaacgccagaattaacaaaccagaagttactttatctaagcgatgaaccaaccatactttaggcacattcagttgttttgcaacaagttctgttaagccttgttcttcttgatctttatgaacgctaataccctcagacttgttgataataataaaatcgctatgttgataaacaacctcgatttccatcagatttgctcctttttgtaaattttatttttaccgagaacaatatcttttaccgaactaagtaattcctgttgaatatgtgagagttttggtttttcgtttaattgaaatgctaacggacgacaaagttccattgctttcacgcctaatctagcagtgagtaatcccacaccaattccttgagcaatacgtgtagataattttgctgtcacatcttgagaaagccaatccattccaatatcttgtgccacttcggttgctccagcaaaagcgatattgaccaataccattcttaacaatctaatacgtgaaaaataccctaattcaatcccataaatttcagcaatcttattcattaatcgaagattgcgccacgcgataaaaaacatatccactacagcaagtggactaatcgcgacaatcacagctgattcagctgccattttactaatcaattttttagcttgtgcatcaaaagaagacaaaacatgacgactgaataaatgagcaatttcttgcgccgaataagcttcatttaattggtgttgccattgaattaccgctggagaatcattttccaaacctaaagattttgcaatatctaagcaaagaattttacttttttctgcgttatgaaaggaaaaaacatcgccattttttaccgcactttctaaccaaatctgctgactttgttgttgtaattgctcacgtttttttaaacgaactaaacgtcgccactcacaaataatctctttaatacccaataaaatgataatcaaactgactaaagcaaaagcaagataaatccattgatgttgttgatagctatcccaaatccactgcacggattgcgcaaccgtcgccaagccaaataaaagtgcggtaaattttaataaagtttttctaaaactggattttggtttcaatgcttgttcaagttgagcatcaagtaactctccgtccaacgcttcatctagctttgcttccatattatggaattcttgcttgggctgatagtgttcttcctctacattaactgaatgttcaaaaatttgtttttccattgcctattccaaaaaataaccccactaaatagtggggtcataaagtcaaaattcaatcattattcatcacttgaaaagatagaaagtaatctnnnnncattccattcattaattaattaatgaatgaatgnnnnngcttgataaatgacatatcttttttcgtagtcaatacataagccggaacacgcaaaaaatacgatagccgttcctgcgaatgcaagcataatcaaatcttccattccacgtgccacatacatatttaaaattggcccgatggtgtatcccataaatccagtgaacgcaaaggcagccaaaataccagcagggcgatcagctaatttattggttaagaaaagtaagccataaaaacccactagtaacacaataatatttggatagggcaagtttaagctcattgaaataaacgcaacaaccgctgaaaaagccattgttaatcccagtaaaaaatatgtgttacgcaacactttatgtgtgctgagtaacgattctttttgagcatccacaataagacgtgattgcataaaagctccttgtaaaataaataaaaagtcttctgtaaagtaagggttagggataaaaaagtcaatggtattaatggaattaatttcatcaaaatgaataaattatcatcatctaaagttaaatcatcaaatttctatttacatcaataaaatattcattatactacgcgcattaatcacggaggaatggtcgagtggttgaaggcaccggtcttgaaaaccggcgagggtttacgccctcctagggttcgaatccctattcctccgccatcagaattaagaaatccctaagtcacaaggcttagggatttttactttgtattacgttatttggtcaatccatttaccagtgaaataacagcctgaatatcgctatcagacaattttccttctttcacaaattttacttttcccgttttgtctaacacgataattgcactatctttagaatttaatccccaagcattttttaccgcacttttatcatctaacacaacttggctatgtggattttcctgtttgccttttttcgcaccattttttacaaacatacctgtaccaacaatcgcatcatccgcattaataatagtggttgtttggtattttacaggattaaaatgggatgcttttatcgcatcaatcatcgactgatttttctcttttgcagccgttctacccgctaaatgatgaacaacacgcactttgcccgctaattccgcagaaccccaaggttgaaatgcggtatcttttccagaaagtacaatttcaccatactcactcactttgaccgatggtaaagattgttctaattgcaaattgtgcgcccaagtcgaactactaaacattacgccacaaactaaggcaagaatttgttttttcatacattttcctcaaaaatttatcgaaaactttcacgctttggcgaaagacatcttttttgctatactcgtacgcctattatatgcaatgaggaaggaaaacccaatggatcaaatgcctaattgcccaaaatgtcaaagtgaatacgtttaccacgattcaattaattttgtttgccctgattgcggtaattaatgggataataatgaaattcaagaatcagatgacgatcaactaatcgtaaaagacagcaatgggaatttgcttgcagaaggcgacaatgtacttttgattaaagatttaaaattaaaaggttcatcagaagtattgaaaaaaggtacaaaattcaaaaacatccgcttagtaaatggcgatcataatgtcgattgcggcaaaatcatgttgaaatctgagtttttgaaaagcttaattgaaaaaaatgcagtctaaattgatctgaccccaaaaagttaggctgttatttaaaggattgttttcgatattgtatcggactcagtccttttaattttagttgaatccgtcggtgattatagtaatccaaataatccctgacggcatcaactatctcctctctacagttaaattcccgatcataaaaacattccgtttttaatcgcccaaagaaactttccatcgcagcgttgtccaagcaattcccttttctcgacatactttgaataatgccatgttcagccaagattcgacgataagctaccatttgatattgccatccctggtctgaatgtaaaatgacaccgcaagctttgtttaatcctttggcgtttggataatttccgttgttcgatttcatcctaaagtcggagtattctccccccccccccttttttaaataagctacctccgcttccagctgtaaaattatcaaacgtaagcagtcttctttccgttttagaaggaggtattttgtcatatttatttcatagagggtcgttctaatgggttacaaggaatcagcctatttatgctattttttcaatgagtttcaactagtgtctgagagaatattgtaaaaacgagccgcttctctgatactcatttttcaattcagaatagattggagaacctataatttaaattcgattgtgtattacccataataaaatctgcgcctcaattgttggtttgtttaatccaactcttgggatacagatcatttcttatctcttaacttaagttgatactacatttctatatttggaaacaacattttaatgacgttcttagtcaatcttcttgatttaccttgataaggaaaaatatgcatcatcatcattggattaaaattagcttcaattactccccaggaatttaagaatggttcagcttgttttgttaaatcaggaataattaaatcgaccccgcaaactttagcccccatcgcacgagcaacccctacagcaatctgtttataactctcatgcattttatcagtcatatcaatagaatcaccacctgtactgatattagaattagcacgtaactgcacaatttgaccagcctgaggtacactatcaggtgctaatccttgttcttttaactgtaataattctatgtcacctaaagcgatctttttgagaggtgaacgagaaccatctccccgtaaaggatctgaattttttatctcgaccaattcacgcaccgtgttctttccatcaccaataacatttgcaggtacacgcaacaacactgcaagcgtttcatcccccaaaacaaagaagcgatattctgtaccaactaaataatcttcaaccatcacttctttatcttcgcgaaaagcaatctcaatcgctttgacaaaatcatctctatgtgtcacaccctgtttgaaaattgtgatgcctaaaccataatttgtggattttggcttaataacgacagcgcgcccttcaaataaagcataatgtgcaacagcttgttcaatcgatgtaaattccaagctttttggtacattaaaaccagcctttgataatactttctttgtcactactttattttccataatcaatggtgagatatattgatcgtgactagtcatattaccatttttaacatattcaaggcgttcatcaaatttaagtgcaagaaattgatcattctcatctaaaatttcagttgtaacacctttttgaattaaatcaaataataaagcttgagtagaaagctccatattatcaaatgcagataaagcgtaaaaacgtttaaaagcttgagctttatatagcttcgcaagttttacccccaaggctttataacttccctcctgctcaatcgctttaagcaattttccatttactgttaggcttggctctgccaattgcaccaatttttcttccgaaattttaaccgctctttcatctgcattgataattttcaacatatcaacaatttggcgcaatattgcttccccctcttctcgaaatgctgtttgctcacgaggatcctcaagggatacttgatataatctttgtttaccaagctctacttctttttgaccacttgtctcatcaagccataacattcctaataagaaagtatgaataaattttgcatcatctagactgataccatatggctcaagtggattcaaatcaaacaaacgaaattctgcatattgaacgcctttttctagcaattcacgggcttttttcgaacctcgtaaacgaacattagaataaaattctttttctgcaatcaaatggccagatttaacttgaaactctaatgtttctacataattttcaaggttatcatgattcactacaacattagatgaattaacgtaaccataggaactagaacgtaaactacgtactaactgcccctctttcaaaggaaaattcagtacgctatttcgagaaaaataattggcttccactgtcggacttgctgcaagtaaataaactaaaatccactgatatcgtagaaaattattagccaatttcatatataaagcattctgaaaatctttaagatgaacatattcatcttggaacaggaatacagctttcacaaattcagatgacagttggaaattgtagtgaattccacttaccatttgcttgtattttccatattgtttagacagatgctcgcgatattcaacatcttcctgtttatcaagctgagcctcttgaatctcattttctggtggtaatcctgcaggcatactaaatgggaaaatgtattcattttcaggtaaagaacgctgcaccacctcatgaattgcagaaagccaacgtaggctatcttccagtttagcatttggtggcgtaatcaactcaagctgactctcggcaaaatctgtttgaatatagggatgataagaacggttaccaaatactcgtggatggggggtcgtcacaatattccccttatcgtcaatacgttgactttccttttctaaaccaaattgaccttgctgaaaaagtaaacctagttgatattgtttaacccatcgttgtaatttcattatctcccctttcaaataaaaacttttattgaaataataccacactaaaagagtctgctttatgttgaaatggaactgaatagataatttagttatataaagattaactaaataaactaaaagggccaagttcctcaaatcacagaactcagcccttaaattatttttaatcttctatttaatccgttttctcattcgaatattgatcatttcgaccacaacagagaatcccattgcaaaatagatgtaacctttcgggatgtgaatatctaaactttctgcaattaagctaattcctactaaaactaagaaggctaaagcgagaattttcaaggttggatgcgtatctacgaaatcgccgattggttttgctgcaaacatcatcacgccaacggcaataataatcgccaaaatcatcacaggaaggtggcttgccatacctactgctgtaatcacagaatctaaagaaaaaacaatatctagcactgcaatttgaattaatacgccaaaataactcactttgtttttgctttcagaattatggtgttcttgatgatttatagcctctttaatttccccaaagctttttataatcaggaataaacctccgattaataaaatcaaatcacgcccagaaattgcttgattaaacagagtaaataatggtgcagtaagtttcatcatccaagcaagtgacattaaaagtaaaattcttgtcagcattgctaaaccaagtccaataatacgaccagactggcgttggctttcaggtaaacgcccaactaggatactaataaaaataatattatcgacccctaaaatgatctccaaagcagcaagtgtcgcaagtgatatccacgcttcaggatcggtaatccattcaaacataatttttcctataatagagttaaatagatccgaaagttcggatcataatgactttatgatgaaaagcaatcgttatttacatttaagagataattgattaatcgtttttgagcgtttcaaaaatcgtttcagcaagtttaagggaaattcccggtacagaggctatttcatctaaggtcgcctttttcacaccttgtaaaccaccaagatatttcagtaaagcctgacgacgtttagcgcccacaccttcaatagtttctaaaccgctttgtgtaaaggctttttgacgttttttacggtgtccgcttattgcgttattatgactttcatcacggatgtgttgaatcaaatgcaatgccaaactatcatcaggcaaatgaatttcgcggtcttgtttgctgatgatcagtacttcctgccctgctcgacgatccacaccttttgccacgccaattaagtgcggtctatttttatcccattttacttgaagatgttggaacacgttcagcgcacgatttaattgcccttttccaccatcaataaaaataatatcgggaattttatcttcttctaaatcacgctcataacgtttctgcaacgcttgttccattgcagcataatcatccccgccagtaatgccttcaatattaaaacgacgataatcagatttcagtgggccttcttgattaaagacaacacaagatgctaccgtttgatttcccatcgtgtggcttatatcgaaacactccatacgcttaatttcagggagatttaacagatcacacaacgcttgataacgctctgacattcgtgaagattgtttaagttgtacatttaaagccgctttagcattaacttgtgcgagctgtaagtatttactcttatcgccttttacactttcttgaatcgtcacttttctgcccgcttgcttgctaagaagttgctcaagctctgatttttcagctaattgacgatcaacaataatactatttgggatacttcgcccttgatgaccttgtaaataaaattgccctacaaaagtttcggtaagttccgataaatccgtattggcggggacttttgggaaataactgcgattgcctagcacttttccttgacgaataaacatcacctgtacacaggctaaaccgtgttgataagcgatggacataatatccatatcatctaaacgttcattggatacaaattgtttttcaataaccgaacgcaccgcctgaatctgatcacgataacgagccgcctgttcaaaatctaaatttctgcttgcctgctccattttcccgattaaataatctaacaccagttgatctttgccttgtaaaaataagcgggctaattcaacttgctgattatattcttcatcggaaacatatccctgtacacaaggcgcagaacaacgcccaatttgatattgtaaacaaggacgagagcggttggaataaacggaattttcacattgtcgaacagggaaaagtttttgtaaaagcgataaagtttcacgcacggcgcctgcgtgaggatagggcccgaaatattcacccgcaaattttttagacccacgataggacgtgattcttggatggcgttctttggttaataaaataaatggataggatttatcatcacgcaataatacgttatagcgaggctgataaagcttgataaaattatgctctagcagtaaagcttccgtttcagatgaagttagcatggtgtcaatatgatgaattgatgccaccaacgcctctgtttttttactactcagatttttacgaaaatagcttgaaagacgtttttttagatcctttgctttcccaacataaataacctgatctttatcgtcatacatacgataaacaccaggttcgtgagagacatcagcgaggaattttttgtaattgaacatagaatattttaccaataacaaaagacatcttgccttcccctggtttcgagggaaggagcctaaagggctgaaggggcttgcgatgttaaatttatcccccctcagccttcggcagctccccccgcaagcaaggggagccaaacatttaatccttcgccaaaaccagccgcactttttccaaatcttcagcagtatccacccctactgcaggcacttctttcgcaagctctacgtgaatgcgttcgccgttatataacacacgaagctgctcaagtttttctagattttcaagttgagtcggagcccattgcacatattgttttatgaaccccgcacgatatgcgtaaatgccaatatgacgtaagtaagcgtccgcaagctgtactttctgaacatcctgtaaattcataaactgatcacgatcgtaaggaataaccgaacgggaaaaatatagcacatagccgtctttatccgtcaaaactttcactgcatttggattaaataattcctcagcatcatgaatttttaccgcaagacttgccatattgacattaaattttgctaaattatctgccacttgtcgcacgataacgggaggaatcaaaggctcatcgccttgaatattgacaatgatttcattgtcaggaatcgctaatttttctacaacttccgctaaacgttctgtaccagaattatgattaaccgaagtcatgcacacttccgtgccaaaacttttagcaacatcagccacattttcattatcggtggcaataatcactcggctcgccccagactgcagtgctttctcaaatacatgttgaatcattggcttacccgcaatatcagcaagcggttttccaggcaaacgacttgatgcaaaacgagcagggataatcacggtaaatgacataatttattccttattctttaatatttcagctttctcggcaagcaatcaaaacaactggagattaatcctttcagccatttctatattgcgccacaagtttgtctattttgtcccaaaagtgcggtaaattttcacattgtttttcagcctcaataatctctgcatccacagggacataccaccaattatcgttggcaaaagattggcattttacggcatctttttccgtcataaagagcggttgattttcagcaagtttttctaattgagacacttcaaaatgttgatgatcttgaaatgcttgagttcgttctaattgaatccctaacttttctaacatagtaaaaaaacgctgtggattgccaatccctgcaatggcaacaccagattgaaattcctttaattggcgtttttcattggtttttaaattaatcgcgaaatggggtacaagatacataactgcatctgaatactgattttttccaccattagtgatcacaaaatctacggattttaatcgacttggtaattctcgcaatgggcctacaggcaatacaaaatcatttcccaatgcacgctctgcgtccattacgacaatttctaaatcacgctgtaattgataatgctgtaaaccatcgtcagaaacaataatatcgcactctgcttggcttaagagtaattcaatcgcttgctggcgattcggggaaatcacgacaggaacattagtacgtttagcaatcaatacaggttcatcgccaccttcaattggatttgtattttcagtaacaaacaacggataagttttagatttactgccgtaaccacgagaaatcacacctacgcgaaaacctcgtttttttaattcttccacaagccacaccaccacgggcgttttgccatttccacccacagacaaatttcccacaattatcactggttttggtgcacgataagaagattttatccccaaacaaaataaggcgcgacgaagttggctaatcaaccaaaacaataaagaaaaaggcgataagagccaaataagtttggaattggaataccagaagggcatagaaaatcctttctaataagtgcggataaaataacgcgagtttttcaactcgcgttttcgataatcaataaattagccactaaactgcatactgtatagctgtttataagctccattttgttcaagcaatgctctatgattgcctcgctcactaatttccccgtgatcaatcacaagaatttcatccgcattttcaatggttgataaacgatgggcgattacgataacagtacgatctttcttcaattcatctaatgcagattgaatggcgcgttctgattccgtatctagtgcagatgtggcttcatctaaaattaatactggcgaattacgcaataaagcacgagcaatcgctaagcgctggcgttgcccaccagataggctcgcgccattttcgccaattaccgtatcaaaaccttgcggtaatttttcgataaactctaaagcataagccgcttttgctgcagcaataatttcttcgcgagaatacttatcttgtgctgcataagcaatattattcgcaatagtatcgttaaataaatggacttgttgagaaaccacggcacagttctcacgcaaattagataaacgataatcttggatatttacgccatccagtaaaatttcgccttgctcaatatcgtaaaaacgtgtcactaaattagcaatggttgatttgcccgatccagaacgtcccactaaagcaacggtttttcctgcaggcacgctaaaagaaatattatttaatgcaagttcctcttttccctgatatgcaaaactcacatttttaaattctaactcgcctttcgcgggttctgctttataagtgccgttatctttttctggttctaaatctaaaatggcaaatagcgtttgacaagctgccattccacgttggaattgagagtttacattcgttaaggattttaatgggcgcatcattgccaacatagatgaaaaaactaccgtaaaagaacccgcacttagattatcttccgcaattaatggcgtggtagctaaaaacaatacagcaactaaagcaaaagaagcaataatctgcacaacagggtcggaaatggaatctgcagtaaccattttcatacctttacgacgcatgttgttactcactttattaaaacgctcttcctcgacaaactgaccaccaaaagaaatcacgactttatgtcctttcagcatttgctccgtcgtcgccgtcaattcccccattgaatcttgtaaatttttactcaacttacggaaaatttttgaaacgatagtgatcaacactgcaataattggcccgataacaaataaaacaagggttaattcccagcttgtataaaacatcactgccaatagcgaaataatatatgctccttctcgcacaatggtaatcaaagatcctgaagaagaacttgcaatcatctcagaatcataagtgatacgagaaagtaatttccccgttgaatttctgtcaaagaaactcactggcataaacattaaatgtttaaataagcggcgacgcattgtcatgacaactttgcctgatacccacgccaagcaataattagaaataaagttagtcacgccacgtaaaataatcattcccacaacaacaaaagccattattttcaaaaatgaatggtttgccttaccaaaaccatcgtccaacaacggttttaacaaataaatcaagcctgaatcagccaatgcattaaaaactaacgcaatacctgaagcaataagccccgctttaaaaggtttaatcattggccacaaacgtttaaaagtttgtaaggttgaaaaatcattttcttgtaatttttgctcttgcataatcgctatctaatagtaaaaattgcgtgcattgtaccttttattcctttgataatccaattacacgtgcataccaaggggaaaattttgtgcgagcttgctggatttctaatcggtcttgaaaaaaatttacccgcacttgccccgaaacagcggtattttctaccgcacttttatagcgatgaagcctttccataaccgaataatgagggaatttccacggattccaacgcccactagaaataatcgctacatctggtctaacctgagaaagcaagtattcacttgtcgatgttttactcccatgatgccccacttgcaacacatcgattttgcctaaagtgcgggcaaaaatttgctcattttttgcttcagcgtcgccagttagcaaaacgctattctttccatcatcgactaaaatcacacaagaatggggattatcagctcgtgtcacaacgttgtgaggagaaagtatttgaaaatgcagcccttgccaatgccaatcacgcccagcagtacaaaaagtgcggtaattttccccatagtttttccgtgaaggggtaatcaattccacattgggatacgcctttaaaattgtcgaagcaccacctgcgtgatcgttatcgtcgtggcttaaaatcaatttttccaaaacaatcccttctctttgtaaataaggcaaaatttccaactcagccatacttccacctcgccaagaagaacccgtatcataaagaatccctttgccatttttcacaatcagcgttgccaagccctgccccacatctaaagtatctacctgccaagttggtttgctcaattgtttaaacaacaaaatcataaaacacataagaataatgccgaaagaacatagcaaaacgttgattcgttcattttttagtaaaggtttactgagattcaatgtaaaaaattttgctcgttttatttgccagtttgatgatgaaatctcgggttctcggtaaatactccaaataattaacataaaaattcctgcacaaagtgcggttaaaaccaatgctaaattaaatgaaacattaaaccaattcccttgaaaaacagaaattaacccagtaattccttcggctaacttgtttgctagttgccaagaaaacattgtgccgttagtaaaaacggcaaataaaattaatggcacaagcaaaaaactataaattggaaccgccataagattggctaaaaatccactcaacgataagccattaaatagaaaaagttgcaaaggtgtaaaaaagagcaataacccaaattgcaaatgaaataaactaaaaatccaccgcacttttggtgaaaaggggcgatttttccattgaaaaagagaaaaaggcacataacgataccagaggatcaaacacccaaccgccccacaagaaagccaaaaactgaccgaaagcggcattaatggatcgcagaaaagcaagaatccgacaaccaacgtaaaaagctgaatgggcgaataatgtcgcctcattatttgaataaataaaacgaaaacaagtgctgaaatggcacgaaaagttggcacactaaaaccagccaaatacgcataaattaaagcaaataaaacaccaaaaactaaaggaaaataaggatgaataaaacgggtggggcaaaagacttgcacaacacgcgccaagcaaaatccaattcccatagccaacccaatatgtaagccagaaatagcaataagatgcacagtattggtttgttggtaaattgaccaagtggttttatctaaccaagcccgttcaccaaaagctaaggcaatcaataaaccttgtagagataatccttccgtttgcttctttacttgttgcaatttttctgctcgcaatgatgaaacatccgcaattttcaccgcactttttaccgttccaacagccgtaattccttttgaaaaataccattgttgccgatcaaacccaccgaaatttaatcgtgcagaaaggggacgtaaagaaatttcagcttgccaaatttccgataattgaggcacctctttcgctttccaatttaagaaaattcgttgttcttgcaaattattctccaatgttgctgtggcgataagcgtttgataatcctgttggtgcaaaatttcttgaatcttaaaagttaccacttgcttttgagcggtaatattttgagcttgttgtgataaactcaaagccgaataatgaaaatagccaagagaggcaacaaaaaaagcaaggctaactaagaaatttctacgcaagaaaataaaaagaaaaatcaaaacaagcgcaataacgagagcaacttgccaaggcaatagcaacggttgcggtagaaataacaacgttaaatccgcgacaattaacaagacagctaaagttattaagtttaatttcatttttataaaagattaattccagcctctctaagcctaggctagttttatttaaatatgcaaacggttgcttcaaattttgcgatccatatcgtaaaaataaatttttcaggaaaatttacttgctaaaacaaacaacttctgatatttataccgcccgcaaaaattgggttcctaaaatagcagtcaggaacaaactaaaataacaagacaggaagtcgtgaaatccacgcttaattctgtatgtattaggagtgagagatgtcaaaagcatcattgagcttgctagatttagcaggcgttaagccttatcaaatgaaaaaagatgaagaatatatgaatgaagagcaaattcttcatttcagaaaaattcttaatgcttggcacgagcaaatcgtggaagaagcttctcgcaccgttgcacatatgcaggatgaagtaaccaatttccccgatcctgcagaccgagcaactcaagaagaggaatttagtctagaattacgtaatcgagatcgcgaacgtaaactaatgaaaaaaatcgaagcaaccttgaagaaacttgataccgatgattttggttactgcgattgttgtggtgaagaaatcggcattcgccgtttagaagcgcgcccaacagcagatctttgcattgattgcaaaactttagctgaaatccgcgaaaaacaagtcgctggttaattcattctattgaaaaatacaaaagtgcggttaaaattagccgcacttttttgcatttaaaaatgcaggaaaatccacttgcctttttctttacaagaaaagagccaagtcatttatttccaacaacaaaacggagtaaattattcttacttatatcaaaaatttgtttggcaagaagacaaaaaaatcaaaagaggttgccaaaacaagtgctcattctaaacgagttgagcgttctaatagccaaatgccaaaagcgcgagcaaaaaaatcagaacaaacacgtcgctatgataaaaatgtgattaaagcggctcaatttgatatttctccgcgtgattttagccgtaatgctctcaatgtagtggaaaaactgcaacgtcaaggtttcgaggcttatatcgtcggtggatgtatccgcgatttattactcggtaaaaaaccaaaagattttgatgttgcaacaaatgctcgcccagagcaaatccaaaacatttttcaacgccaatgtcgtttagtcggtcgccgtttccgcttagcacatattatgtttggtcgagatattattgaagtcgccactttccgtgctaatcacagtgatgctcgcaatgaaaatcaagcgaaacagagcaatgaaggcatgttactgcgcgataatgtttacggtacgatcgaacaagatgcagcacgccgtgattttacggtcaatgcgctgtattacaatccgcaagataatacgttacgagattatttcgagggcattaaagatctcaaagcgggcaagctacgcttaattggcgatcctgttacacgttatcaagaagatcctgtgcgcatgctacgctcaattcgtttcatggcaaaacttgatatgttccttgaaaaaccaagcgaacaaccaattcgtgaacttgcgcctttattaaaaaatattccgccagctcgcttatttgacgaaagtttaaaattattgcaggcaggacaaggggtaaaaacctatcggttattacgccaatatggtttatttgaacaacttttccctgcattaagctcatattttacagagaaagaagatagctttgcagaacgcatgatcgttaccgcccttagttcgacagatgaacgtgttgcggataaacttcgtattaatcctgcattcttatttgcggcatttttctggtatccattacgcgaaaaagtggaaattttaaaaaatgaaggtggtttaaataatcatgatgcttatgctttagcaggtaatgaagttttagacttattctgccgagctttagctgcaccacgtcgtcatactgcggtcattcgagatatttggttcttacaactgcaattattaaaacgtactggctcagcaccaatgcgtaccatggaacatccaaaattccgtgctggctttgatttactggctatgcgtgcggaaattgaaggtggcgaaaccattgaattagccaaatggtggcacgaatatcaattcagcaatggtgaacagcgcgaacagttgatacacgagcaacaacgcttacatcctaaaccaaagaaaaaatactaccgtccacgccgtcgtaaaacaacgcgctcagctgaataaggaaaaagatgattactgcatatattgctctaggtagcaatttaaacacaccaatagaacaattacatgctgcgcttaaagcgataagtcagttatcaaacactcatttggtaacaacgagctctttttataaaagcaaaccgctcggcccacaagatcaacccgattatgtgaatgccgttgcaaaaattgaaaccgaacttagtccgctcaagctattagatgaattacagcgtattgaaaacgagcaaggtcgagtgcgtttacgtcgctggggcgaacgcacgttagatttagatattttgctctacggcaatgaaattattcaaaacgaacgcttaacaattccccattatgatatgcataaccgtgagtttgtcattgtgccgttgtttgaaatagcatcggatttagttttaccaaatagtcaaatcataacagagctggtcaagcaatttgctgaccacaaaatgataaaattaaatccctagaaatttcaccgcacttttatgaacctcaaaagtgcggtagaatcagcccacatttttcttcattcatgacccgttatggaaagtttgactcaatatatccctgatgaattttctatgctccgcttcggcaaaaaatttgcggaaattcttttaaaattgcatacagaaaaagcaattatggtttatcttaacggtgatcttggggcaggaaaaacaacgctaacgcgcggaatgttgcaaggtatcggtcatcagggtaatgtaaaaagcccaacttatacgctggttgaagaatacaatatcacaggcaaaatgatttatcattttgatttatatcgtttagcagatcctgaagagctcgaatttatgggcattagagattattttaatacggatagcatctgcttaattgaatggtctgaaaaaggtcaaggcatattgccagaagcggatattttagtgaatattgattattacgatgatgcacgaaatattgaattaatcgcacaaacaaatttgggtaaaaatattataagcgcattttctaattaacttatttatgaaaactaaaattttattttttctttttttctcgacatttagcttttctatttttgcagctcctattacgattgcaattgaccctggtcatgggggaaaagatcctggtgcaatcggccgaaacttaggcatttatgaaaaaaatgttaccctttcaattgcaaaagaattaaaagccttattagataaagatccacattttcgtggtgtattaacgcgtaaaagtgattattatatttccgtgcctgaacgttcagaaatcgcacgcaaatttaaagcgaattatcttatttccattcatgcggattcatctgaatcgcctgatcgtcgcggggcttctgtttgggtattgtcaaaccgtcgagccaatgatgaaatgggtcaatggctagaagacgatgaaaaacgctcggaattacttggtggagcgggaaaggtgctttcacacaataatgacaaatatcttgaccagactgtacttgatctgcaattcggacatagccaacgtacaggctatgtgttaggcgaacatattttgcaccattttgctaaagtaacaacattaagtcgcagtacgccacaacatgcaagtctgggtgttctacgttcgccagatattccttctgtgttggtagaaacgggatttctttccaattcagaagaagaaaaaaaacttaattcccaaacttatcgtcgccgcattgcttatatgatttatgaaggcttagttgcattccatagcggtaaaaccaacactttagttaaagacaatttagtgcaaaacatcaaacaaaacgatataaaaaaatcagggaaaaataaccgcacttcagaacaaaatataaatgaagataatattaaagacagtggcattcgccatattgtaaaaaaaggagaaagtttaggcagcttatcaaataaatatcacgtaaaagtctctgatattattaaattaaatcaattaaagagaaaaacactttggctaaatgaaagtattaaaatccctgataatgtcgagataaaaaataaatcattaacaattaaagaaaatgattttcataaaaaacaaaatagctcagtaaataataccaataaagatttaaaaaaagagaaaaatacacaaactaataatcaaaaaaatataattccgctctatcataaagtaacaaaaaaccaaacactttatgctatttcgagggaatataacattccagtaaatatactattgagcctaaatccacatttaaaaaatggcaaagttattacaggacaaaaaataaaattaagagaaaaataaatgcctattaaaattctttccccacaacttgctaaccaaattgctgctggagaagtggtagaacgccctgcgtctgtggtgaaagaattagtggaaaatagccttgatgcaggtgcaaataaaatccaaattgatatcgaaaatggtggggcaaatttaatccgtattcgtgacaatggctgtggtattccaaaagaagaattaagcctcgctttggcgcgacatgccacgagtaaaattaccgatcttgatgatcttgaagcgattttaagtttaggttttcgtggcgaggcattggcaagtatcagctctgtatcacgcctaacccttacttctcgtaccgaagaacaaactgaagcgtggcaagtctatgcgcaaggtcgtgatatggaaaccacaatcaaacccgcatcacatcctgtcggcacaacagttgaagtcgccaatctttttttcaacacgccagcccgccgaaaatttttgcgcacagataaaacagaatttgctcatattgatgaagtcattcgccgcattgctttaacaaaattcaacacagcatttacattaacgcataatgggaaaattgtgcgtcaatatcgtcctgccgaagcaatcaatcagcaactaaaacgagtcgcagctatttgtggggatgattttgtcaaaaatgccttacgaattgagtggaaacacgatgatttacatttatcaggttgggtggccacaccaaattttagccgaactcaaaatgatttaagttattgctatattaatggccgaatggtgagagataaagtgatcagccatgctattcgacaagcctatgcacaatatttaccaaccgatgtttatcctgcgtttgtcttgtttattgacttaaacccgcacgatgtagatgtcaatgttcatccaaccaaacatgaagtacgctttcaccaacaacgcctcattcatgattttatttacgaaggcataagttatgcactaaacaatcaagaacagcttaattggcatacagaccaaagtgcggtagaaaatcgcgaagaaaatacggtgcgtgagccccaaccgaattacagcattcgtcctaatcgtgcagctgcggggcaaaatagctttgcgccacaatatcatgaaaaaccacagcaaaatcaaccgcacttttctaacacaccagtgttgccaaatcatgtaagtactggttatcgagattaccgttctgatgcaccgagtaaaactgagcaacgtttatatgctgaattgttacgctcgttaccgcctacagcgcaaaaggatatatcggatacagcacaacaaaatatttcagatacagcacaacaaaatatttcagatacagctaaaatcatctcaactgaaataattgagtgttcatcacatctacgagccctttcacttattgaaaatcgtgcgttgttattacaacagaaccaagatttctttttgctttcattggaaaaattacaacgcttgcaatggcaactagcgttaaaacaaatacagattgaacaacaaccattgttaattccaatcatatttcgtttaacagaggcacaatttcaagcatggcaacaatattcagatgacttcaaaaaaattggctttgaatttatcgaaaatcaagcacaattacgcttaaccttaaataaagtgccaagtgcattacgcacacaaaatctacaaaaatgcgtgatggcaatgctgactagagatgaaaattcatcatcatttttaaccgcactttgcgcacaattagaatgcaaaacctttaacgctttagcggacgcactcaatttattaagcgatacagaacgtttactgactcaaacgaatcgcacggcattcacccaattactcaaacctgttaattggcagcctttattagacgaaatttagattcttcatgaaaccaaccgcaatttttttaatgggcccaacagcctcaggtaaaacagatttagccattcaactacgaagctcacttccagtcgaagtgattagtgtagattcagcgctcatttataaaggaatggatattggcacagcgaaaccatcaaaagaagaacttgcccttgcgcctcaccgtttgattgatattttagatccatcagaaagctattccgcaatgaatttccgcgatgatgcactacgcgaaatggcggatattaccgcacaaggcaaaattccgttactagtgggcggcacgatgttgtattacaaagccttaattgaagggctttcccccttgccttctgctgatgaaaatattcgcgccgagcttgaacaaaaagcagctcaacaaggttgggcagcattgcatacagaactcgccaaaatcgatcctatttctgccgcccgaattaatcccagtgattctcaacgaatcaatcgcgctttagaggttttttatatcacgggaaaatcactcacagagctgactgaagaaaaaggcgaagccttgccttatgattttgtgcaatttgcaattgcgccgcaagatcgccatgttttgcatgaacgcatcgaacaacgctttcataaaatgattgaactaggctttcaagcagaagtggaaaaactttatgcacgtggcgatttaaatattaatctgccgtcaattcgctgtgtaggctatcgtcaaatgtgggaatatttgcaaggtgattacgcttacgaggaaatgattttccgtggtatttgcgctacgcgccaacttgcaaaacgccagcttacttggctgcgtggttggaaaacaccaatacaatggctagatagtttgcaacctcaacaagcgaaagaaactgtattacgtcacttagattcttatcaaaaaggttagaaaaaatgaccgcactttctgccctcatcgaacaaaaattacaatctcttggcacaatcctgtgccaatcttttccagaactttccccagaaaaaattcacgaagccattcaacaaaattcaaatcatccagaactgcctgtttatcaattaggttatgccatagcaatgtctgactttgtggaaaaagtcttgcaaaaatacccgcacttagtgaaacaatggtgggaaaaatccccctgttttgcagattgcactgcctatattgaacgtttgaatagagagttagccaatgtacatgacgaaactgcactctatcaaacattacgccaattccgtaacattgaaatggcaaaattaagtttttgtcaaagtttgaatcttgccactgttgaggaaatttttgttcagctttcacaacttgcagaaagtttaattatctctgctcgcgattggctttatcatcaagcctgtgcggagatgggcacaccaatggatgaacaaggcaatccgcagcagctttatatcctaggaatggggaaattaggcggctttgaactaaatttttcctcagatattgatttaatttttacttatccatcacaaggggaaacgtccgttgagaatacgaatgctcgacgttctgtggataatggaaaattttttacacgtttagggcaacgccttatttctaccttagatgaatttacctctgatggttttgtgtatcgaaccgatatgcgcttgcgcccatttggtgacagcggcgcgcttgttctcagctttgcagcaatggaacaatattatcaagatcaaggtcgagattgggaacgttatgcgatgattaaagggcgagtattgggcgtacaaacaaaggatcccaacgtttcaaaattgcaaaaaatgttacgcccttttgtctatcgccgttacattgactttagtgtgattcaatctttacgtgaaatgaaaggcaaaattgagcgagaagtacgccgtcgtggtttgaaagataatattaaactaggtgctggtggtattcgtgaagtcgaatttatcgtacaagtttttcaactcattcgaggcgggcgagaaatcaatctgcaacaacattcactcttaaagatcttgcctgaaattaccaaactaggattaattaccgaacaacaattccacgatttacgtgaaagttatatttttttacgccgcgtagaaaacattctacaagccattaacgatcaacaaacgcaaacactaccaaccaatgaaatagatcaaattcgtttagtcaaggcatgtaaaactttcacctgtttaaatgaaaataatcaaaccattgaaaaacattatccaatagaaaattgggacgatttttaccgcactttacaacaaaaacaagaaaaagtgcgggcagtatttactcaattaatcggtgatgaacaagatgagccttcacaaactgatagccaatggcaagattttttagaagcagattttgaggatattgaacaaacattattagagagtggtgtatcagaaaataatattgatgaagttttagaaaagcttgctcaattcaaaaacagcctaaatcacagagtgattggttcgcgtgggcgtgatgtattaagtcatttaatgccaacggtatttgcactcatttttgaacaagaaaattaccgcactttgctcccccgaatactgaacattattgaaaaaatttcgagtcgcacgacttatttagaattattattggaaaatcctcgtgcccttcagcaagttattgaactttgtgcgcagtctcaacttatttcagagcaactggcgcgccatcctatcttattagatgaattgcttaatacggaagcactacgccatccattgccatttacccaatatcctgcggagttacaccaatattttcttcgtttaccacttgatgatgaagaacagcttattgatgctttacgtcaatttaaacaagcaaccctattaaaagtggcagcggcagatattttaggtgcattaccagtaatgaaagtaagcgatcatttaacctatcttgctgaagccattattgaagtggttgtgaatctagcttggaaacaagtatcttctagatttggcgtgcctgaacatttacaaaatgatgaaaaaggatttttagttattggttatggaaaactaggtggtattgaactcggttataaatccgatttagacctcgtatttttgtacgatgccgtagaaagtcaaacaacaggtggcaaaaaagtgattgatagcaatcaattttacctacgcttggcacaaaagattgtgagtattttcagcataaatacttctgctggcgtactttatgaggcagatatgcgcctgcgcccttctggcgatgctggcttaattggctgctctctttctgcattttcccattatcaattgaatgacgcttggacatgggaaaaacaagcacttgtgcgtgctcgtccagtatttggcgaatcatctcttaaagctaaatttgagcatatccgccaacaagtgctttctgcatcacgagatattgaacaattaaaacaagatgttattgagatgcgaaaaaaaatgtttacccatttatctcactcaaaacacagtgaatttaaccttaaaacagatcgcggtggcattacagatatagaatttattgctcaatatttaatgcttgccaatgccccgaaaaaaccacaactaacaaaatggtcagacaatgtacgtattttcgatgatatggcagaggctaaaattattagccaaacagactgcgacacattaaaacaatgttatattgatttacgcaatgctattcaccatttaaatttgataggcaaatcccccgttgtggatgaaactgaatttgtcaaagagcggtcatttattcaagcattttgggataggttatttgtatcctaaaatatggcttgtggacgtttcaaaaatagccttcatcacaaatcttcttgaaacctcgcaaaaactaaatattcaatcctatttttaatgaaccaaatctaacatttcctgtgcattggctagagctaattctgtgatttcacttccgcccaagagtcttgccaaggctggtacacgttcagcttgtgaaagtgcggtcatttttgtttcagttttattatccacagtaaatttttccacattaaactgatgatggccatgacaagcaacctgtggcaagtgagtgacgcataatacttgacaacgctcacttaattgacgtaaaagttttccgacaacgcttgctgtttttccgctaatgcccacgtccacttcatcgaaaattaaggttggaatagctgattgatcagaagttaaaacttgaatcgctaaagaaatacgagaaagctcaccaccagaggcaattttagctaatggctgcggttgttgtcctaaattactacgcaaagtgaaaatcacattatccgcaccatttgcactcactttatctaaatccgtattcaactctacataaaattcagcgttttccattgcaagttgttttatcgactgtgtgacattttgcgctaagcgggttgcagattgctgacgacttgctgttaatgctgtagccgttgcttgcatttgttcaaatgcgagtttttcttgctcaatcaacatctcttcactttcagaaaaatccaaaagtgcggttaattctgcttttaattttttgtgctgttctacaagatcttcaggtttaacttgatgtttacgagcaagttgtaaagtctgactaattctttgttcgatttcctgtaaaagctgaggatcttgctcgatattacttgataaattttgcacttcactggttgcttcttgcacttgaatcaacgcatcattcaacatattttgcacttcagcatattgcggatcaagttcagctaattcatcaatatattgtgtcgcacgataaagcaaactatcgatatttacggtgtcattttcacttaaaatttgcagtgctgattgggaaagttgagttagctgttcgctgctagataaacgacgttgttcatcttctaattccaaatattcatttgatcgaaggttaaattcatctaactcatccacttgatactgtaaaagttgtttacgtgcttcattttccgccactttttgttgaaaggttttaacttgattttgaagatttttccatgtctgataatcttcacgcattttcacaagtaattcaggatgagcggcaaaattatcaactaactgaagctgatagtcattttttaacaataattgagaagcgtgttgcccattaatatgaacaagatattgagcaatttcttttaattgagaagcggatactggtgtactattaataaaagccttagaacgtccgtctgcattaattatgcgacgtaaaatacattcagttggattatctggatcctgtaattcttgctcactcaaccagtgataagcaggattttgcgattctagttggaaagttgcacaaatttccgcacgctcttgcccttcacgcaccattgaggtttctactctttgtccgaaacataaacctaaagcatcaatggcgatagattttccagcaccagtttcccctgttataacagacattcctttcgccaattcaatatcaagctgacgaacaatcgcaaaattattgatagtaagttgagtaagcatagcaaaatcctttaactgtatatttaatatggtataactgatttaatttacagtaaaggatttttttacagtattttgtcaaatctatttcaatcgaaaatttttaccataatcaaaatgattttaaccaacctaatttgctacttaacacattgtaataattataatttttcagatgaagcaatcggagtttatgctcgcttttttgaatatgcaccacatcatctggggtaaaaggtaaggtaatttgactatcacagcccacttctaattgagaggtattatgttcagcaaaacgaattgatattttactatccccatcaacaacaagagggcgagaagttaatgtatgtggaaacattggcactaatgcaatggcattaaggtttggtgtcaaaataggtccaccagcggaaagagaataagccgtagaacctgttggagtagaaacaattaatccatcagaacgttgagaaaatgcaaacttatcattgatatatacgtgaaaatcaatcatatgtgcaattttggcgggatgaataaccgcttcatttaccgcattgctggttgatacgatttcacttgctcgttcgatttttgcttccaataaaaaacgttcttccacaaaaaattcgccacgttctaaacaagcttcaagctgggaataggcatttttcgggtcaatatccgttaaaaatcccaaattaccacgattaataccaatcaatggaatatcatattttgctaatacgcgagcgcgccctagcatattgccgtctccaccaatcacaatggctaattgggctcggccacctatttcttctaacgtagcaagatgttcaaaaggtaactcaagtgttatggcgacttctttttccaccaacacttgataaccacgttccattaaccaatgaaataagtttttgtgcatttgtaagttaatatcattgcgaggcttacctacaagagcaatggttttaaaggaacgatataaatgattcataaaatgaccgcacttgaatttaacattttcgtcattatatcgttttttgctacactatgcccaattacgattaatcaattttgttttacggagaaaaaaatgtcagaacaagaacaaaaagttaaaaacccagaagtagaaaatcaagaagtagaaaatcaagaagaagtcgttgtggaagaagcacaacaagcagctccttctcaagaatttgatcctttagaagaagctattgcccgcgtgcaagagcttgaagagcagctaaaaactcaaatagaagaagccgcaaataaagaacaggatattttacttcgctctcgtgctgaaattgaaaatcttcgtcgtcgtactgaacaagacgtagaaaaagcacataaattcgctttggaaaaattttcaaaagacattttgaatactatcgataacctagagcgtgcgcttgccactccagcaaataaagaagatgaaagcgtaaaagccttatttgacggtgtagaactaaccttaaaagaattagtttcaaccgttgggcgttttggcgtggaagctgtgggagttgtcggtgaagcatttaatcctgatttacatcaagccatttcaatgcaacctgctgaaggctttgaaaccaatcaaattagcgtggtattgcaaaaaggctacaccttaagtggtcgagtcattcgcccagcgatggtaatggtggcagcttaatttacatttggtctaaagagcggtcggtttttcgaccgttttttctttttcctgaataacaacataaactttacggataatttccctaaaatcttcgctcgttgtagcccaatctagaagatcaacgcgccacggtaaatctgattcagaaaaagcttcttttaatctgtcacgagctaaaaaatctaaaggttcctcagagataatcgcaaggtcaagatcggaatatttttttgcttttccctttacacgagaaccgaaagcccatacggtataatcaggtacgaattgttgtaaaatagttttcacaatcgccaattcttcagattttatatcaagctgtgcaaaactagtcatattaatttctctgacgtaattgttccaataggaaacgactttctattaaaaaatcatcaatttgtgcataaacagccatggctttttcctgatcataagtatgtgatgtaatattacgcatatcacgataagcaacccattttgacatatcttcaatcaaaccaaatctcaatgcttctcgcaaaatatccttaaatccataagccccaatgtcatcggtattaattgcatcttgttgaagttggcgtttcatcatttttaaacttaactcataaacaaattcaaatttctgaattgcacctgcaattaaggtatcttgtacaatagagggttgcatatcaaaccaatttctgtctgaaatttgtactacggtttgctctaacgaataaaatgtagcgtctaatacatttaaatttagcttatcagtcatcatttttacctctgttaaatactcatctattttaccatagactattttttctcaaaacctataaccccaaaagtaaacattgtgatattgatcacaaaatcaaaaawatttgagaaaagctctcaacaacttaatgtgatatttttctaataaaatcaatctttaacaaaattatcttacgacaaaaaggtctaaaacactacatattgtgtgttgattatctttttagatctatatatagtgcaatccgcattcaaaannnnncattccattcattaattaattaatgaatgaatgnnnnnccgcatttcaaaacactatatatttggagctatatcatgagtaactttggggtcatcaagcgcgatggttctcgtgcggagtttgagattcaacgtatcattaatgccattaaaaaagccgcaagtgcggtcaatatttccgatgaattttattgccaccaaattgggcaagaagtagggaatgaaattttcacccgtcatcaaggcgagattgatattaatcagattcaaaaaatcgttgaagataaattgatggcaagtcgttatcctgaaattgctcgtgcgtatatcgaatatcgtcatgatcgtgatttagcacgagaaaaacgtagccagctaacaaaagaaattgaaggtttgattgaacaaagcaacgtagaattacttaatgaaaacgccaataaagacgcgaaagtgattccaacacaacgagatttgcttgctgggattgtggcaaaacattatgccaagcaccatattcttccacgcgatgtggtagaggctcacgaaaaaggtgaaattcattatcacgatttagattacgcgccgttctttccaatgtttaactgtatgttagttgatttagaagggatgctttctcgtggtttcaaaatgggcaatgcggaaatcgaaccccctaaatctatcggcaccgcaacggcagtgacagcacaaattatcgcccaagttgccagccatatttacggtggcacaaccattaatcgtattgatgaagtactttccccttatgtgcaaatcagttacgaaaaacatctcaaacatgcccaagaatggaacgtgcctgatgttgaaggttatgccaaagcattgattgaaaaagaatgtttcgatgccttccaatccttagaatatgaagttaatacactacatacttcaaatgggcaaacaccatttgtgacctttggttttggtttaggtacaagctggcaatctcgcttaattcagcaagctattttaaaaaatcgtattcgtggacttggaaaaaatcataaaacgccagtctttccaaaacttgttttcaccattaaaaaaggcttgaaccaaactcaaggcgatccgaattacgatatcaaacaactcgcattgaaatgtgcatcaaaacgtatgtatccagatattctcaattacgatcaagttgtcaaagtcacgggatcttttaaagcccctatgggatgtcgtagctttttaggtgcatacgaagaaaaaggtcacgaaattcacgatgggcgtaataatcttggcgtagtgagtttgaatttaccgcgtattgcgttggagtccaaaaacgaagaagatttctaccgcactttagatgaacgtttggctattgcgaaaaaagcattaatgacgcgtgttgcccgccttgagaataccaaagctcgcgttgctcccattctttatatggaaggtgcatgcggagtgcggttaaaagcggatgaaaatgtggcacaaattttcaaaaatggacgagcctctatttcgctcggctatatcggtattcatgaaaccattaatgcgctatataaaaaagggcatatttttgatgatgaacaattacgcgaaaaaggcattgcgattgttcgccaccttagcgaggcagtaaaacgctggcaaaaagaaactggctatgccttcagcctttactccacgccaagcgaaaacttatgcgaccgcttctgccgtctagataccaaaaaatttggcgtgattgaaggcgtcacggataagggctactacacgaacagttaccacttagatgtagaaaagaaagtgaatccttacgacaaactggattttgaaatggcatatcccccactcgccagcggcggttttatttgctacggcgaatatccaaatattcaacacaacttaaaagcattggaagatgtgtgggattatagctacgatcgcgtaccttactacggcacaaacacaccgattgacgagtgttatgaatgtggtttcactggcgagtttgaatgtaccagcaaaggttttgtctgccctaaatgtggcaatcacgacagcacaaaagtgtctgtcactcgccgcgtctgtggctatctaggcagccctgatgcccgcccatttaatgcgggaaaacaggaagaagtgaagagaagagttaaacacctttgatttaactccctagcaaaagcacgcattttttaatgcgtgctttttgttaccaactttggcattccccaaaatctccgctaaaataaccgcactttttcttatcttctaggaaagcaatatgtcagatattctcaataaccttattcatcttcttaaacttgaaaaaattgatgatttaatctttcgtggtgaaagccaagatttaggttttcgccaagtatttggcggtcaagtagtggcacaggcgttatctgcagcaatgcaggtggcaccagaagatcgcattttacattcttgtcatgcctattttcttgctccaggagacagccaatatccgattatttacgatatagaaaccttgcgtgaagggcgtaatttttctgcattacgcgtaaaagccattcaacataaaaataccatttgtcatgtaaccgcttctttccaagtgccagaaaaaggttttgaacatcaaaattcaatgccaaatgttggcgcgcctgaagactttacagatgaaaatgtgatgctacaaaaagtggctcaaaccttgccagaaccactcaatgaaaaatttgcggcagagcgtccatttgaggtacgtaccaaatatttgaataacccatttaacgggacaaaattgccagccgagcaatattcttggtttaaaaccaatggtgaaacgccgcttgatataaaaattcagcaatgtttattggcttatttttcagattttcactgtattttgaccgcacttcatccgcacgaaaaaggctttttacaaaaaggaatgaaagtggcaaccattgatcatagtatttggttccatcgtccgtttgatttaaatcactggcatttgcacgcaattgaaagcaataatgcctttggaggccgtggtttggcgcgcgggcaaattttctcgcaagatggtcaattaatcgcgacaacacaacaagaaggtttgatccgttttaacgaataagagaaaaaatgaccgcacttattacacaattttggcaacaggttgaaaccgcgcaaaccttgaaatcccacattaagaaatgatgaaaaaataaaaagactaagttctattacattctgaacttagtctttttaatgaaattaatttaacgtttaaatttattgcttacgccaagttgttccattcggcccatcttctaatacgatgcccatagcggtaagctcattacgcgcagcatcagcagtagcccaatctttagcagcgcgggcttcattgcgttgtttaatcagtgcttcaatttttgccacttcatcatcgtcagaacctgcttgtaagaatttttctggatcttgttgaagtaatcctaaaatcgcccctaattcacgcaaacgcgcggcaagtccattggctttctccgcatcctctgtttttaacttgttaatttcacgcgccatttcgaataaaacagaaagtgcatttggcgtattaaaatcatcgtccattgcttcacggaaggtttccacaaaattttctccgccaaaagcaaccgcactttgatccgttccacgtaaagccgtgtataaacgttccaacgcaccttgcgctaaattcaagttttcttcgctgtaatttagctggctacgataatgtgccgttaataagaaataacgtaccgcctctgcattatagtgatttaatacatcacgaattgtgaagaaattgccgagagatttcgacattttttctttatccaccataatcatgccggaatggatccaataattcacatattgtccaccatgcgcacagcaagattgcgcaatttcattttcgtgatgagggaacattaaatcagagccaccgccgtgaatatcaaaatgttcgccaagctgtttgcagttcattgcagaacattcaatatgccaacctggacgacctgcgccccaaggggaagaccaacttggctcgttttctttcgacattttccaaagcacgaaatccattggatttttcttgatttcattgatttcaatacgtgcaccagcttgtaattgctcaagatcttgacgggataatttgccgtattctttgaagctttctacatcaaacatcacatcgccattatccgcaacataagcatgtccacgtttaatcaatttttccacaatttcaataatttcaggaatatgatgggttgcgtgaggctcaaaatcagggcgtaatacattaagtgcatcaaaatctttatacatttcctgtaccatacgatccactagctgatcgcaggtttctttgttttctaatgcacgtttgatgattttgtcatctacgtccgtaatattgcgcacataagttaaatcgtaacccaaagaacgtaaataacgggcaatcacatcaaaacacacaaaagtgcgtccatgaccgatatggcacaaatcataaacagtaacgccacaaacatacattcccactttattttcgtggataggtttaaagatttctttttctctcgttaaggtattgaaaatttttagcatttttaagctcgtaaaatgaaataaaaacaaaccgcacttttatagcacttttacctcgattgtggaataatacgacccttaattttttagagggaaaacaaaatggttacattacacacaaattttggcgacattaaaattaaattggattttgataaagctccagttacggcagaaaatttcttaaattactgcaaagacggtttttataataacacaatttttcaccgtgttattgatggttttatgattcaagggggtggtatggaaagcggtatgcgtgaaaaagcaactaaagcaccaatccaaaatgaagcgaacaatcgtttaagcaacaaacgtggaaccattgcaatggcacgcacgtcagatccacattcagcgaccgcacaatttttcattaacgtggcagacaatgatttcttaaattatcgttcaaaagaaatgtttggtcgagaagtcgttcaagaatggggctatgcagtatttggtgaagtggttgaagggatggatgttgttgataaaatcaaaaaagtgaaaacaggcaacaaaggctttcatcaagatgttccaactgaagatgtagtgattacattggtttcagtagaataatggtgaatggcggatgaattccgccattttttatcgacctaaaggaaaatgctcatgcctttcttcgacactcacacgcatcttgattatctccaacaatttactggggagccgttgtcacagcttattgataatgctaagcaagccgatgtgcaaaaaatactgattgtggcggtgaaagaagctgattttaaaacaatccaaaatatgaccgcactttttcctgataatttgtgctatgggcttgggctccatcctctttatattcaagaacacgccaaaaatgatttgattctgttagaacaagccttaaaaaatcgtgatgcaaattgcacggcagtggcagaaattggtttagaacgcgcgattcctgatttgctcaccgatgaattttgggcaaagcaatgtcatttttttgaaagccaactttatttggcaaagcaatttaatttacccgtcaatattcacagtcgaaaaacccatgatcaaatttttacttttttaaaacgtattccattatctaaacttggcgtggtacacggtttttcaggaagctacgatcaagcaaaacgctttgttgatttaggctataaaatcggagttggcggcactatcacttatgaacgagccaataaaactcgtcaagcaatcgcgaagttgccgcttgatgccttagtgttggaaacagacagtccagatatgcctgtatttggttttcaaggccaacctaatcgaccagaacgtattgtggaaagttttaaagccctttgcaccttaagaaatgaacctgctgaattgattaaaaaacttacatgggaaaatgcttgccagattttttcttgatccacgtcacattactgaaattattttgaattaaattgcagtattcaatggcttaaaatccatggtgacatcgggcaattatgcttcttattatttagcgcttttgccttccgaaaatggcgaaactattgataactaggtgcttccacttggtactcaaggcttaacttttgaagctgatagctggaatggcttagatatgcgtagcaatgtttcttgctttatgcgcatgaccgatatgccattagatcgtagctggcgtgtagcgtggaactctcccctaattacatgtatgccatggcaactggagcaaagatgaaagcgtattattgcgtgggccttatacatcattagtggatttatttgaatcggcattacctgatattttaatgctcgaattttctacgccaagagcaggagagttaagttcgttattagaaagtgaaatcttaagacaaaaatgtattttaggcttaggcgtcatcaatcctcgttctgatgaagtggaaactgcaacacaaattgttcagcgtacagaaaaagccttaaattaccttccaccagagcaaatatcaaaattttagacaaaaaaattgccccattaaggggcaatcttatcaatgcgctaaagttacttagctttaaacaacgattaaatatgttggttaatgaagttagctaattgagtttttggtaatgcaccaacttgagttgcaacaacttgaccatttttaatcaataataatgttgggatactacgaacaccaaattgtgctggcgttgcttggttatcatccacattcattttcacgattttaactttacctgcaaattcaggtgcaagttcatctaacactggtgcaatcattttgcaaggaccacaccaaggtgcccaaaagtctaataaaacggggatatctgaattaactacaacactttcaaaatctgcgtcattaatgtgtaatacttcgctcattttgttttccttattttgtgaatggaatccctatataagggctttttttaaacttacaagtgcggtgcagaataacaccgttttaaaaaatgtaaactaatcgttttaattgccaaaagctaagacggcaaaacaatattttcacacactttaccagattttaatttataaatgtttgataaagtcacgtctgcaatattggttagtgcttcttcggttaaaaacgcttggtgacctgttagcaatacattatggcaagaagataaacggcggaaaatatcatcttgaatcacttcgttagacttatcttcaaagaataaatcacgttcattctcgtaaacatccatacctaacgcaccgattttacgctgttttaacgcatcaattgcagcttgagtatcaatcaaagaaccgcgactcgtattaacgatcatcacgccatctttcatttttgcaaaagcctcgcgatttaataaatgatagttttctggcgttgctgggcaatgaagcgtaatcacatgagatttagcataaagctcatctaattcaacatattgtccccccagttcttccaccactggatttttaaaaggatcgtacgccaagatattcatgccaaaacctttcaaaattcgcatcactgcgatcccgatttttcctgttccgattacgccgactgtgcgtccgtacatattgaaaccaattaacccctcaagagagaaattcgcttctcgggtacgctgataagcacgatgaattcgacggttcagagtcatcatcaaaccgatggtatgttccgccaccgcttcaggcgaataagctggaacgcggacaacttggatgcctaattcttgagctgcttttaaatcaacattattgaaaccggcacagcgcaaagccacaattttcacaccaagtgcggctaatttttctaatacttttcggctaccattatcattcacgaaaatgcatactacttcgcaatgttctgccaaacgcacagtgctctcgttcagcataaaatcaaaaaattctaaatcgaaattatatttcgcgttaatgagctcaatatattttctgtcataacttttagtgctatagattgcaattttcatggtttgctccaattattttaagtttgcaaaagcctgtaataagtccgctttaatatcttctacatcttcaataccgactgaaaaacgcaacaaggtattagtaatcccacgagctacacgctcgggttctggaatatccatatgagtttgagtggcaggataagtaataaaactttctgtgccgcctagactttctgcaaaagtaatcaatttgatggattttaagaatgtattaacccaagcttcatcttgcaaacggaaagacaacatcccacctttatttggataaagcaccgattccacttgtggttgagcttttaaaaattccgcaatggcttgtgcattttcttgatggcgtttcatacgcaaagaaagggtcttcataccacgaatagtcagccaagaatcaaaaggagaaagcaccgcacctgcaccattttgaatataagcaatccgatcacaaagttcttgcccttttgcaacgattaaaccaacaagtgcatcattatgaccagcaatatatttagttccgctgtgaattaccacatcagcgcctaaatctaacggacgagaaagcacaggcgttagaaacgtattgtccacgatcaacatcaaattatattttttcgcaagttttgcaatttcaactacatcacattcttccattaaaggatttgatggggtttcaataaaaatcgctttcgtatttgggttaatggcagcctcaatttctgaagcagatgctgtattaacataaacaggttttacactattgttatttttataagaaaaatctaataatcgataagtaccaccatacacatcgctagaaacaatccattcatctggggcggtaaaaagtgtcatcaaaacttgaattgcagccataccagaagaaaacgcaaaaccacgatctccattctctaatttagctatcgtttcttctaatactgtgcgagttggatttttggtacgtgtgtaatcaaatcccgtactttcaccgataccacaatgaccataagccgtagaaagaaaaattggtgcagaaaccgcgcccgtacgctcatcactgcgattgcctgcttgagctaataaagtatcaatagcatattgttgtgtcataacatcctctacaaataatgaaaaaattgaccgcactttacgtgttaaaaaacgtttagcattttggcacaaaggaaaaagtgataaaagtagaaattagaaaattacataaaatttcatttttccatcattttctgtgatttatttgaacaaaatgaactttttttaaacggttagacaatttttttaaatctgtaattgacagttatctgaatttccgtaaaatgcgcaccactaacagcgaatgcgggaatagctcagttggtagagcacgaccttgccaaggtcggggtcgcgagttcgagcctcgtttcccgctccaattcgtggcgtgttagcaaagcggttatgcactggattgcaaatccatgtagctcggttcgactccgggacacgcctccataatacgcaaatgttagttgtctatatgcccgagtggtggaatcggtagacacaagggatttaaaatccctcgcctttcgaggcgtgccagttcaagtctggcttcgggcaccatttaaacaccaatctaaaggttttaaaattaattttaaaatcagtcttttgggtcgttagctcagtcggtagagcagcggacttttaatccgttggtcgaaggttcgaatccttcacgacccaccacttaaaaataaagtaagcaccgaaaggtgtttttttattgcctaaatctgatactattttttaaattacttgcttattgaaaaatagctattctctccatccaatctaaaataattaatatattttatcgctacgttatattttctaaaataaaatagcacctgaaaatcagatgctatccaaaacacaataaaaatttaccgcactttatgacttcaataagtaagcccgtagttgtgcaaaatcattatccatttcatcagaaagcaatggtagctgattatgtttatccagtgtttcaggtaatggaagctgaataccaagaatacgttctacggatgctttaaatttcgcgggatgtgcagtgcacaagaaaatacctacttcatctgctttaagttgatctttcaacacctgataagctatcgcaccgtgaggctcacataaataacctttcgactgcatcgcttttaaagtatcttctgtttcgctatcacttagcatccccgaacctaaatcagttaaatcccaaccatttcgtttaaacaattcctccactctcggccaattatttgggcgacttacatccattgcattagaaagggttacaactgtcgttttaggatcccaattacccgatttcaaataacgtggcacagtatcatttgcgtttgttgaggcgacaaagcgttttatcggcaagcctaaggtttttgcaattaatcccgccgttaagttaccaaaattaccacttggcacagaaaccacaacattatcatgtttttcttttggcaattgtgcgacagcctcaaagtaataacaaacttgagctaataaacggctgatattaatagaatttgcagagttaagtcggatagtttggcgtaattcaacatcatcaaaggcttgtttaactaaagcctgacacgcatcgaaatcagcgttaatagcaacagtacgaatattcccacctaaagtacagaatagcttttcttgcaatgggctgattttgccttttggataaaggataactacattaatattttctaatccataaaacgcatgtgctacagcggctccagtatctccagacgtagccgttaaaatagtaattttgccatcaccacgaactgctgcaagcgcctgagccataaaacgcccaccaaaatctttaaatgctagcgttggaccgtgaaataattcaagtgcataaatattatcttccactttttctaacggtgcaggaaaagtgaatgcatttttcaccatcgcatctaacgttgcttgtggtaactcgccatcaattaatgcacctagaattttttgactacgctcaacaacaggcaattcaagtaattcattaatgttattaagttgaggaataacttctggaaagaatagaccttgatcccgcccaagaccttgacgaacagcctgagaaaaagtgacttgttcttctgggtgtttgatattgtataaattcatatttaatccgtttttaatctgatttcatctatttaaattaacttatttaatttctcttgtgccttcgttatcaactttacatacatgcacaaaaccttcattattttgtaaataatggctttctaaataacttgaaagtttaattgcagtttgtaaatcaggggcaatagagaaaattgttggccctgagcctgaaatacctgtggcaagtgcgcctaagtctcgtgtagcttgttttacttcagcaaaattaggtaacagagattcacgataaggctcggcaatgacatctttcatcataatcgcggcaagattttcctgatgggtatggcaagcatgcacaaagccacctaaatgacgaccatgggcaatcacgttttgtcgagtatagcttttcggtaaaattgcacgagcttcagcagtagaaacttcaattcccggataggctaacacccaataccaattatcaaaaaatggcaatttttgacaaatattgccgagcgattgcaccataaattgcacaccgccaagatagcaaggtgcgacgttatcataatggattgaaccagaaatacgaccttccaattctcccatcatttcaagcaattccattttcgaaaaaggttcattatgaaactgatttaatgccactaatgcagcaacaatagaacaagcactagagcctaaaccagagccaataggcatatttttttcgagcgttaaacgtaaaggtttaacatttcctccgcgtaattttaattgctcgctaaatagcacataagcttggtaaacaatatttttttgcggttctttcggtaatttacgaacaaaatagcccgcactttctaactcaaaaccagttgaaatagattctatttgaaccacatcgcctaacaaagaaccatcaataggagagatcgcagcacctaaagtatcgaaacctacgctaatattcgcgctagatgcaggggcgtaaattcttaacattggaaatccttattaatgttgtaatgttcttaaaatatctgcaaagatacctgccgcagtaactgcattacctgcgccataaccacgtaataaaagtggaatcggttgataataacgagtataaaatgccaaggcattttcaccatctttcactttataaagtggattattcagatctaccgcaacgatggatactttgcattttccttcactaatttttccaacataacgcaatactttgccttctgctttagctgtggcaacgcgagttttaaattcttcatcaagctgaggcaacattgccataaactcatctgcagattttccatcggagaagccttttggcaatacaccttcaacttcaacatctgaaagttcaagttcaattcccgcttcacgagcaagaattaataatttgcgtgctacatcttgtccagaaagatcatctcgaggatctggctcagtaaagcctttttcacgcgcaagtgcggttacttctgaaagagaaagtccttcttccaacttaccaaaaataaaggaaagcgagccagataaaatcccttcaaaatattcaagctcatcacctgctgcaagtaagttttggagattttcaataactggcaagcccgcacctacattggtttcatataaaaatttatgctggcttgcttgggcattttggcgtaactcattgtaataaactaattctcgtgtattcgcttttttgtttggcgtaaccacatggaaaccttcttttaacgcacgagcataaagccctgctacagattcggctgaagtacaatctacaaatactggattcaccacatgatgtaatttaatgaaagaaagcaatacatcaaaatctgatggctgagtcgcattttctaaatcgtttttccaatcctctaaatttaatccattttcatcaagcaacatacggttggaattcgcaatagcacaaactcgaatttcaacattcttctttgctagatactccttttgacgctttacctgctcaattaattctccgcctactccaccaacgcccactaaaaacatatccacgacttttttattattgaaaagcgcctgatgggtggccttcaccgcttcaatggctttattttgcggcacaaccgcagaaattgaacgttcgctagatccttgtgcaatcgccacaatgctaatgtttgcctgcgctaatgccgagaagaaacgagcagcaatgcctttcgcttgcttcattccatcgcccacaacagaaataatggataaatctttaatcacttcaattgattctaattgatgtgcatttaattcattagcaaactccgtttctagtacggttttcgctacttctgcagatttcacaggcacacagaaactaatactatattcagacgaagactgagtaattaaaataactgaaatgcctgcgcctgacatggctgaaaatacgcgagatgccatgcctaccataccttgcataccagggcctgacacattaaacatcgccaaattgtccaagttagtgatacctttaacttgcaaactttctgatttcacattgccatcaataatcgaacctggcgcagaaggatttcctgtatttttaatgacacaaggaatattttgtggcaacaatggcccaatcgtacgaggatgaatcactttcgcgccgaaataagagagttccatcgcttcacgataagaaagcgttggtaataaacgtgcatcaggcactaaacgcggatcgcaagtataaacgccgtccacatcggtccaaatttcgcatacacttgcgcctaaacaagcggctaaacaggcggcagaatagtctgagccattacgaccgagcaataccaactcgcctttttcattacccgcagtaaaacctgccatcagcaccactttatcttttgcgatatttgctgcatcaacacgttttgttgattcttcaatttcaacagaagattcaagataaccgccttttgccaataattgtttgacaggatccacaatatgtacgctatagccacgcgcttcaaaccaagctttcatcattgcaatagaaagtttttccccacggcaatcaatggtcgctttaactgcatcttctacttttcctgcctgacggatttcttctaataatcctttgatttgagcaaattcagcatcaataagtgccttggtgccatttaagtcgaattgattattttccgtatgtaagccgttgatgatgttatagaaaatttcgattgcttcgttgaaatgcgtatcggttgattgatttaatgcagctttttcagaaagggcgacgagatggttggttattttggctggtgcagataaaacacctgcagcctgctcttctaaatgagcttgttcgatcaatttcgccgcttgggaaaaacgttccggatttgcaagcgaagtgccgccaaatttaagtacgcgcataattggttctcctagatattgtgtttttaaatttataaaaaaacccgctattcagttgaatcgcgggttttctgtatcttatttttgctgcactaacccgcaccattaatcataataatggtcatcataatggcggtaatcgtgctaatgattacggataaagtgcggttatttttcattgtgttttatcttgaaaaatgaatgcgtaaagaaataccgaaatttccctagcttgtcaaacagaaagtgacaaatttttcagaaattttcttagtcaataaatttcgtgtaaactaaccgcacttttttataaaggaaaacctatgaatatccagcataatctcaacctaattcagcaaaaaattgaaacggcttgtaaagaagaaaatcgcaatcaaaataccgtaaaattacttgccgtatctaagaccaaacctatttctgctattctttcggcttatcaagcgggacaaacggcttttggggaaaattacgtgcaagagggggtagaaaagatccaatattttgagtctcaaaatataaaccttgaatggcattttatcggcccattacaatcgaataaaacccgtctcgttgcagaacattttgattggatgcaaacgcttgatcgagcaaaaattgcagatcgtttaaatgaacaacgaccgaccaacaaggctccattgaatgtattgattcagattaatatcagcgatgaagaaagtaaatcaggtattcaacctgaggaaatgctaacactagcaaaacacatcgaaaatttaccgcacttatgcctacgtggcttaatggcaatacccgcaccaaccgataaaatcgctgaacaagaagccgtgttcagaaaaatgtcagacctatttgaacaacttaaacaagtcttacccaatcaacaaattgatacactttctatgggaatgacggatgatatgccgagcgcaataaaatgcagttctacaatggtacgcattggcacttcgatttttggtgcgagaaattattcaacatcacaaaataaataatcatggaataaggctcgaatttaaaacaagccttatttcttaatgaaatttaaatgccagtactctcgccacattttgagcggtagaaattaaattttgttcgccttgtttgagaatatccgataaatcgccaagttggtgaataatagggaacaccgcatcaataccgtgatcaaacaccacatcataatcttcacgcaaacaccctgcgatggcgatcactggcttattgaactgttttgccgtacgtgccacaccaattggcgttttacccataatactttgtgcatctattcgcccttcacccgtaatcactacatcagcatcttttacataatcaattaaatgtaaccggtctaacacaatttgtatgcctgctttcagttgtacgcttggtaataatagcaagccaccacccataccaccagcagcacctgcgccagcctgatcacgaatttgtttaccgcaatcgcgttcggcaatttcagcaaaatgcgaaagtgcagcatcaagttgtttcaccatttcaggcgttgcgcctttttgtggtccaaaaatggcagatgcaccacattcaccacagagcggattattcacatcgcacgctacttcaatgtgaacttgttgcaaacgtggatctaattgttgaacgtcaatcttcacaatatttgctagctctgctccaccaaaaccgataggcttatcttgcgaatctaaacattgcatccctagtgcttgcaacattcctacaccaccatcgttggttgcgctaccgccaatgccaagaatgaaactctctacgcctaaatctaatgccagtttaatcaactcccctgtgccgtaactggtggtaagcaagggattgcgtttttcaggcggaacaagatgtaaaccagaagctgctgccatttcgataatcgcggtttttccatctcccgataaaccgaagaaacttttcactttgtcacccaaaggtgcggtgacttcacattcaatgagcttgccttgcgtggcatccacaagggattgaactgtaccttcgcccccatctgccattggcaattttacatagtccgcatcggggaatacacgtttgaagcctgtttcaatggcggtagctacttcaagtgcggtcaaactttctttaaaagaatcaggtgcaatcacaaatttcataataactcctagaatttaaatacgccaaaaattaaggtagaaacgatggtcatcatcaaaccgaccgcactttcataaggaataagttttaaacgttctttgatatccatattcacactaccgcctgtagcatggaagaaagaaccatgtggcatatgatcaaatacggtcgcccctgcatgaatcattgctgcaccagcaagactgctaactccaagttctaacaaggtactactgaacacattggatgccaccgcagtacctgccgtggtagaagctgtcgctaaagacatcaacacccctgaaattggtgcaagaatgtatgatggcaaacctgaatgttccaaaccttgaatcaatacttcttttaaaccagaattagcaatgatgccagcaagcgcgcctgtaccaagtaacataattgccacgggtgtcattttactcaatccattgatagcataactatttatattgcgaagtttgcccatacaaagcgcaccaatcaaaccacctaacggcaatgcaattaatggatcaactttaatatcaaacaatggacgaagtgccaatagcaaaattgccactaaaggtgcgacaagtgcggtcagaaatgaaggtaaattttgcgtttcaagcacgattacctctttgtcagtcactttagaacctttgttgattaagcgttttgctaagaagtaggtgagaatcaaaccaaatagcgcgggaattataccagccatcatcacggaagtgagtggcaaatgaaaagtatctgctgccgcaatggcatttgggtttggcgacataatattaccagctttaccaccgccaatcatggcgagcaaaattgcagctttcgataaatcgctgcgacgcgataacgctaaagcaattggtgaaacagtaatcactgccacatccacgaacacacccaccgcagttaaaatcatcgtcgctagtgccaaggcgagtaaagctcgagtttcacccaatttattagtaatggtttccgcgatggaatttgctgcacccgattcaatcagcacgcctgccaacacaccagcagctaagatacgcataactgcagtagtaataccctgtgcgccaccgatcattaggctcactgtttgcgataaatccgcaccaccaattaagcctccaaccaaagctcccaccaacataccataagctggtgagacttttttcaaaatgaggaagatagcaacgattaacgccaccaacgcacctattgctgagactgttgtcattttttctctcctataaaaattaaaaccaaggagattatttctgttttatagggaaaatgctttattagagcaaacaaaaagtgcggttaaaaatcatcaaactttgtaaagttatacaacctcaatgttctaacaacgttccgagatagagcgttaatttatcatctatcttattgaaaaataaaccagttatttgctctattttgttcaatcgataacgcaaagtattcgggtgaacaaataatttttccgcagtgagataaagatcacaatttgataaaaaatattgttgaagggttttataaagtgtcgcattttcttctgagaaaaggggtgaaaggggttttatcaattcgttcccttgccaagaatgggataatccagcaagtaacacaggcaatcgatgctcatcaaacacataaatacctttgcgtggatgatgttttaatccataagaaagcgtgctttgcgcactttgaaaagacaagggaagctgctcaaaaagcggtagatttagacaagcgcctacagcaattttataatcttgttttgaataatctgcaggtaaaagcgttttcatttgagcagaaagtacggtggagttttgccaagtctttaagaccacaacctgatcaagggacaaaattgccacatcctgtgcaaattcagactgttccaaataattgatcagatgctgtaaattatccagggctgaattaagtaacttaatcaatacaaccacacgagatttatttaaatcaaaagaaaaaaatttcgcctgctgttccatctctttccaattcaaattgcaatgtaataattgtaaaataaattcttctttgtaacgacgatgccagctttcttgttcgagtaaagcctgttgttccacaataagttctgccgtcattttcactagttcggcatattgtttcacctgagttggctcaccagaaatccccaccactccaatatttttgcctaaataatgaatcggtaaattaatccctggttgcgcttcaaaattccatttttgtgccaacgcttgatcaatctctaccacacgattttcccgcaacgccaacaccgctcctgtgtgccgttgattcaaacgcgttgaatttcccgacgcaatgatcacaccgtcgtgatccattacatttacagagtgatgaatgatcttcattgcacgtttaacaatttttttagcagtgtatttgtcaagttgcatatttgtaataaagaagataaatgaagataaaatattgagaaaaagaaagttagtcaaatattgttttatctgcaagaaaagacgggagactattctcccgcactgcgtttttatcgctataatgttttattctgaacttgaacatatcccataattaatgccaaaatacctagtggaaaaatgagatctattacagaaccatcatttccccaaatcaagaatagctttgatgaaaataagtaaaatcggtaagacaataggaatactcacgacatagcccgtaatggctaatgcccattcttcctttttcttacctagaaatttgataaagctgaacgccattttttcagcaactgggcagattgaagtttcaccatgtaaaggttctcgaataatgctacttacaaaggaagaagccgctttatttggttttcctggacggatacaaattgtgggcaggcgaacacagagaccatcaacaaaaccttttcttgtatagtcattaataagtaattcactcattgctttttgtgcaccataagtcaattgtggcgttacagcagtagaatcctgaataatttctggtaaatcaccaccaaatacagcaagtgaactagaaaaaataaaacgaattttagtatcagattcatcaaaatatgggaaagtggcgacattccatatttgtccactaacaaattttgatcacataatttgcgacaaaaatcttgttgaatctgcacagaatggcattagagaattaaatattaatttaactatcgtataaataaattaatataaatgatctgcaccccaaaactaaacaaataagcttactcattaaggtgcaaatcaaagtgcggttcatttttatattatttttggctacatacagcaataaaatgtaatttatgttcaggatcattaaaggttttgaacattcttttaaattgctcacgattttccgttttcatcgcattacggatgatttttaacgtaccgaaaattccttcgtcatagatcattccttttggagaaagtaaggtcatctcaccagagaaagcatcgacatttctaaagccactttcttggaatatgcctttccatccatctttcgttaatggcgtgacagtcacgttaatcgctttgcgcatattttctagaatagtttgatgatcattccccaccagcataacatcgtgagtaagcaataaaccatttggttttaacactcgaaaatattctgcaatggcttttttcttcgcttccacgggtaacattgtgagcatcgcttcattgatgacaatatcaaaactttcatcctcgaaaggcaacttcatcgcattcgcacgctgtacatgaattttttcttgcaagccatttgcttcaatatttgcttgtgcttttgctaacgcattttcatctaaatcaacaccttcaatatgacaaccaaattgtttcgccaatccaattgcagtcgtccccatattacaggcaacctctaacacttttttatcttggctaaaatcgccattagcaattaaccaatctgtcgcttttttaccgcctggacgcaaacgcgttttacccaaacgtgcaagaaaattatgccctacttcatcttttgccatttttatctcctagtaattaacttggtttttatattatagataaaaatgataactattaaaatggcagatcaaataaataaggcggaataattgttccgcctttttctcttatttcttcaatgcttttttcaattcaatttattcctttgaagataacaaaacttacataccgaaacgctttactcaatatgtaaaaacattggtagaaggtgcaaatcagtatattgttgctggaaatatgtataacggcgacgtagaagatttgaataaaccgcatctttatttgatgtctcaaatggaaaaaccgacaactaaagctgagttgaaatcagcattacaaggctatttaattcaaaatgaatatcaagatatgaataacaatgataaattgattgatgaaacttatgattgcactgagttgtttaatgcactttgtgatgtattaacaagattaggctatatccagcctgtaaacctataatctatgtatggttcgtttaatgtaccgttttgtttttcatctaaatatcaatttaaattgagaactatttgcatttaaataaaattaggcatagaatagccacaattcaggcttaactgaataatttgcactcaacataaggagcttttcaatgcaatttaaacatttcaaacttgctacccttgcggcagcacttgctttttctgctaatagttttgctgatattaccgtttataatggtcagcacaaagaagccgctacggctgtggcaaaagcctttgaacaggaaacaggcattaaagttacgctaaatagcgggaaaagtgagcaacttgcaggtcaattaaaagaagaaggcgataaaacaccagccgatgttttctatactgaacaaacagcgacttttgccgatctttctgaagcagggcttttagcaccaatttcagaacaaaccattcaacaaaccgcacaaaaaggcgtaccacttgcaccgaaaaaagactggattgcattaagtggtcgttctcgcgtagtggtttacgatcacactaaattatctgaaaaagatatggaaaaatcagtgcttgattatgcaacaccaaaatggaaaggcaaaatcggttatgtatcaacttctggcgcgttcttagagcaagttgttgcgttaagcaaaatgaaaggggacaaagttgcgcttaattggttaaaaggtttaaaagagaacggaaaactttacgctaaaaatagtgtggcattacaagcggttgaaaatggcgaagtacctgctgcgttaatcaataactattattggtataacctagcaaaagaaaaaggcgtggaaaacctaaaaagccgtctttattttgttcgccaccaagatccaggtgcgttagttagctattcaggtgcagcagtattgaaagcctctaaaaatcaagctgaagcacaaaaattcgttgatttcttagcgagtaaaaaaggtcaagaagcattagtggcagcgcgtgcagaatatccgttacgtgctgatgtggtttcgccatttaatcttgaaccttatgaaaaattagaagcaccagtggtgtccgcaacaacagctcaagataaagaacatgcgatcaaattaattgaagaagctggattgaaataatccaaatattgcgtgcgtgtatttgaaaaaattcacgcacgcgtttacaattctctaacaaaattaaccgcttgcgtgcgtgaactgaaaggttcacattcctaaaaggatttaactttgcctcgcagaccgccattctggctcactttacttatcatcttaatcgggcttccgttatgtttgccgtttctgtatgtcattttgcgtgcgacagaagtgggattaacgcgaagtgttgagctattgtttcgccctcgaatggctgaattattaagcaatacaatgcttttaatggtttgtgtaactattggtgctatttcacttggtacgctttgtgcttttttacttgaacgttatcgctttttcggtaaagctttttttgaagtggcgatgacgttacccctttgtattcccgcctttgtaagttgttttacttggatcagcctcacattccgcgttgagggtttttggggaacaattggtattatgacattaagttcatttcctttggcttatttgcccgtttccgccatactaaaaagacttgatcgttctcttgaagaagtaagcctttcgcttggtaaaagccctgtgtataccttttggtatgctatttttccgcaacttaaacccgccattggtagtagtatcttactgattgctttacatatgttggtcgaatttggtgcagtgtcaattttaaattatcaaacctttaccactgccattttccaagaatatgaaatgtcttttaacaacagcactgctgcattattatctgccgttttaatggcgatttgtatacttattgtttttggggaaattttctttcgtggaaaacaaacactttaccacagtggaaaaggtgttatgcgtccttatctcgtaaaaacactttcctttggaaaacaatgtttaaccttcggatttttctctagcatattcattttaagcattggcgtgcctgtgattatgttaatttactggcttattgtgggaacttcactcgaaagtgcgggtgatttttcagaatttttatcggcattcagcaattcatttatcatttcaggcttaggcgcattgcttaccgtaatgtgcgccttgccattagtttgggcagctgttcgttaccgtagttatttaacgatttggatcgaccgcttgccatatctattgcacgctgtgccaggcttagtcattgccttatcattagtctatttttccatccattacgctaacgacctatatcaaaccttttttgtgattatcattgcctactttatgctctatttgccaatggcacaaactacattaagagcgtctttagagcaactttccgatcaaattgaaaaagtcggacaaagtcttgggcgaaaccctttctatatttttcgcaccttgacgctaccagccatattacccggtgtggcagccgcatttgctttggtttttttgaatttaatgaaagagcttaccgcgacgcttttgctcacatcaaatgatattaaaaccttatccattgctgtgtgggaacataccagcgatgcacaatatgctgccgccaccccttatgcgttaatgctcgttcttttttcgggtattcctgtatttttattgaaaaaatatgcgtttaaataaaatgataaataatccgttactaaccgttaaaaatctcaataaattttttaatgaacaacaagttctgcacgatatttcattcagcttacaacgcggagaaatcctctttttacttggtgcttcaggctgtggcaaaactacattattacgtgccattgcaggttttgaacaaccctctaatggcgaaatttggctaaaagagcggttaatttttggcgagaattttaatcttccaacgcaacaacgccatctcggttatgtggtgcaagagggcatactttttcctcacttaaatgtctatcgcaacattgcttacggattaggcaacggcaaaggaaaaaatagcgaagaaaaaacgcggattgaacaaataatgcaactaacgggtatttttgaactggcggatcgctttccacatcaactttcaggcggacaacaacaacgcgtagcattggcgcgtgctttagcccctaatccagaactgattttattagacgagcctttcagtgccttagacgagcatcttcgccaacaaattcgccaagagatgctccaagcacttcgccaaagcggtgcttccgcaattttcgttactcacgaccgtgatgaagccttacgctacgctgataaaatcgccattattcagcaaggtaaaattttacaaatcgatacgcctcgcaccctttattggtcgcctaatcatcttgaaacagcaaaatttatgggggaaagtattgttttgcctgcaaatctactcgatgaaaataccgctcaatgccaattaggcaatattcctataaaaaataaatcaatctcacaaaatcaaggtaggattttgcttcgtccagaacaatttagcctgtttaaaacatcagaaaatccaaccgcactttttaatggacaaataaaacaaattgaatttaaaggaaaaattacctccattcaaattgaaattaatggctacgcaatatggattgagaacgttatttctcccgatttatctattggcgataatttgcctgtttatttacataaaaaagggcttttttacgcttaacaataaagccttatcttcacgataaggcttatttttaaacaatatattcggaaaaaatttgttcaagatgtgatattaaacagtctgtgcctaaaatattttcccctttccacgcctgttgcaaaatctctggagaaaattgctggcttgccaattcagctaacggcaaataactgatatgccaaggctcccgccccactttcttattggactgcatattcataaaaggcaaagcaaaatcaaagtgcggtaaattttcggcaagaaattcactcaattcaaagaagtagccgcctttttcatattcccaaggctccagttgtaaagattgcccttgtggcaaaagatcaggatcaaaaatatccacttccgttccccaatgatgacggctcgcccccggcaatgcagaccaacgtaaaatcgcctgacatttttgccagtcatctaattggttcaaatctaatgcctttcctgcatcatcgtgtacttttcgctcgcccttaaatttactgttccaaataagtttttggcgttcaaaatcacgaaaactgctcgcaggctgtaaattaaagccattttttgccgcactttgttgcaaagcttgaaatgcttgcatagcttgtgtttgcaaaaaatgatttgatgaatgagttgtgggtaaattgactaaatgctcacgagactttcctgtaagcatttctagggttaatttcattttagctatccaataaattcactaacattttgtgataaatttcaccgcacttgccaagatcttctatactgacacattcattgactttatgaatggttgaatttaacggaccaaattccactacttctgcgcccatcaatgcaataaaacgaccgtctgacgtgccaccacctgtttcagcctttggcgttatgcctatggtttcctcaatagcggaggttatcgaatctaataatttacctggttttgttaaaaagggtttgcctgataaattccattcaatacgatatttcaaattgtgtttttctagcatttcagcgactttttgcttaatgatttcatccgtgacttctgtgcaataacgcaaattaaactgaatatataattcagcaggaattacattattacttcccgtacctgcgtgaatgttagcaatttgtaggcttgttggcgggaaaaattcattgcctttatcccattggtaagtcgttaattcttgcaagaatggggctgctttatggattgggttttcagctaaatgcggataggctacgtgtccttgaatacctttaatatagagatttcctgtaattgagccgcggcgaccatttttgacaacatcgcctaagtttttagcactcgatggctctccaaccatacaataagtaattttttcatcacgcgccattaacgtctcaaccacgcgtatagttccatcttttgcggcagcctcttcatcagaggtaatcaataatgcaatggtgcctttatgattaggatttgcttttacgtattcttctgccgccacaatcattgctgcaagggagcctttcatatccgccgcaccacgcccataaagcatgccatcaataatctccgcagaaaacggcggagacgaccattgattttcatcgccagtaggcacaacatccgtatgacctgcaaaagcaataactggctcgctcgttccgtgttttgcccacaaattcaacgtgtcattaaaaggcatccattcaatttgaaaacctagcttttctaaacgttcggcaataatttgctgacagccttcgtcattcgggctaatagacgggcgacgaattaaatcttgtgccaacgaaaccactttttctctcataaaaactcctaagaaaataaccgcactttaagcaaaaacagcctgatattccttttcattaaagccaattaatgccttttcatcttgtaaaataattgggcgtttaattaaagttggattctcagccaacacggaaagtgcggtggttttatcaagggaatttttaacttgctcatccaaattacgccaagttgtactgcgtttattcactaacacatcccagccaaattgagtttccgcttgggttaaaaaattcaaatctaacccatcaacacggtagtcgtgaagtttgtgttcgatattgtgatccgccagccatttcaacgctttcttcactgtatcgcaatttttaatgccgtaaactgtaatcatatttcacctaaaaaagaaaaatcctcaatctaatcagactgaggattttaacccttatactacttcatctcaaatgaattaacctaacaacttattgatacgtttaataaacgcagctggattttccaaagatccgcgctctgctaacatagcttgttcaagcaacagttccacccaatcagcaaattcagtttcatctgcaatatcagccacttttttcactaaatagtgttctggattcagttcaaatgtgtattttacttctggtacaggttgccctgcggctgcaaacaatttcgccatttgggtcgtcatttgatcgttatccgtagaaaccaccgctggtgtatccgttaaattgtgagttaaacgcaccgttttcacacgttcgccaagcaagtttttcacacgctcaataaaactaccaaaggctttatcttgttgtttttgtgtttcagattctttatccgctaaatcgcctaaatccaaatctgctttcgtgatactttgtaattgtttaccgtcaaattcagttaaatagcttaacatccattcatcaatacgatcggaaagtaataaaacctcaatgccttttttattgaataattccaagtgtgggctatttttcgctgcaacataactatccgctgtaatgtaatagatagctttttgcccctctttcatacgcaagatgtaatcttctaaagagacagtttgctcactaccatcattatgtgtcgaagcaaaacgcaataactttgcgatagtttctttgttagcaaaatcttctgcagggccttcttttaagactaaaccaaactctttccagaatttaagatatttttctgcatcatcttttgctaatttttctagcatttgtaatgaacgcttagttaatgctttgcgtagtgcagccgtaattttgttatcctgtaaaatttcacgagatacatttaatggcaaatcattactatcgattaaaccacgcataaaacgtagataattcggcataaattgctccgcatcatccataataaatacgcgttgaacataaagttttaagccgtgtttatgttctcgattaaataaatcccaaggtgctttagctggtacataaagcaaactagtatatgcttgatttccctcaactttgttatgcgcccaagtcacaggatcaacaaaatcatggcttaagtgtttgtaaaacgctttgtattcctcatcggacacatcatttttagaacgcgtccaaagggcatcagatttattaattttctcccatttctcaccgcactctttgccttcatcatcgtattctttcgtcagcatttccactggcaagccaatatggtcagaatatttaccgataatttcacgcaaacgccattcatttaaaaattctttttcatcttcacgtaagtgcaaaatcacatctgtgccacgggattttttctcaatatccgccacagaatattcgccttcgcccgcagattcccaaagtacagctttatccgcctcttcgccagctgctctagtttttacagtcactttatctgccacaataaaagcagaataaaaacccacgccaaactgcccaataagctggctattttttgcttgatcttgaccaagtgcggttaaaaattcttttgttcctgattttgcaatcgtacccaaatgatcgatgacttgctcacgggtcataccaatgccgttatcgctaattgtgataatgcctttatccgcatcaaagctaacacgcacacgcaagtcgccatcgccttcatataaagctgggttggaaagtgctttaaagcgtaatttatctgccgcatcagaagcattagaaatcaattcacgtaagaaaatttctttgttagagtacaaagaatgaatcattaattggagtagttgtttgacttcagattggaagccgcgagtttcttgattttgtgacataattttttccttcataaagataaaaattgaacgtcacagatataagaataaaaagaaagatttcaagaggaatttaagaggaaaagtgcggtaaaaaaacacaaggaatttaaaccgcactttaaataaaaaatttcttatttcccctttatcgctataaatttatgtatataatgaattctgttttagatactagatagtaatttaatagtaatgaaacttggctagtgcattcccccactcctttcgcactagccatttttttgggaattttgtaccatatcccaactttttccaatcaacgatccattatgaataatcttgaacttgaacaactcattaatcaaaaactttcttccgataaaatcaatgactatgcgcccaacggcttacaagtcgaagggaaaacagaaatcaaaaaaatcattactggcgtaacggcgagtcaggctttaattgattacgcaatcagccaaaatactgatgctattttggttcatcatggctatttttggaaaagtgaaaacccttgtattcgaggaatgaaaggcaagcgaattaaagcccttttagtgaacgacattaatttatatggctatcatttgccattagatgtgcacccagaattaggcaacaacgcacaattagccaaactgctcgacattgaaaatttacaaccattagaaaaaggctctgtgagtattcctgtttggggcgaattaaaagaaccgatgacaggtaaagactttgcagaaaaaatagaaaaagtgttaaatcgaaaaccgttaatttgcattgaaaacggaccgcacttaatccgaaaaattggcatctgcactggtggcggacaaggttatattgatcttgctgcagaacaaggctgcgacgcatttattacaggggaagtgtcagaacaaacgattcattctgcccgtgagcaaggattgcatttcttctctgcaggtcatcacgcaacagaacgctatggcatcaaggcattaggcgaatggttggcgaaagaatatgactttgacgtagaatttaaagatatagataatccagcgtaaaatacaaaagtgcggtaaaaatatttcttttttaaccgcacttttatcttctgaaattatcgtttaaacattccgcctaaaccgccaagaccgcctaagcctccgcccattaagccttgcattcctcgcatcattttagccatgccgcctttacgcattttcttcatcatacgttgcatttcatcgaattgtttaagtaatttattgacatcttgcacttgagtgccagagcctaatgcaatacgacgacggcgagatcctttgataatatctgggttggcacgttcttttagggtcatggagttaatgatcgcttccattttgataaacattttgtcatctacttgatttttaacgtgatcaggcaaattttttgcacctggtaatttctcaagcatagacatcatgccacccatttttttcatttcgatcagctgttcgcggaaatcatctaaagtgaaatcatcgcctttcttgaatttctgcgccattttttccgctttttcacgatcaacagaacgttcaagatcttcgataagggaaagcacatcgcccatgcccaaaatacgggaagcaacacgatcaggatggaaaggctcaagtgcctctgttttctcgcccacacccaagaatttgattggtttacctgtgatttgacgaatcgataacgccgcaccaccgcgcgcatcaccgtccactttcgtcaaaataacacccgtaagcggtaatgcttcattaaaggcttttgctgtatttgccgcatcttgacctgtcatcgcatcaacagtgaaaagagtttcgattggatttaatgcagcatggacttgcttgatttcgtccatcatttctgtatcaacgtgtaggcgacctgccgtatccacaatcaacacatcgtagaatttcagttttgcatcagcaagtgccgctttagcaatatcaacggggttttgtttaacatccgatggaaaaaaatccacgccaacggattgagccaaggtttcaagttgcttaatcgcagcagggcgatatacgtcagcagacaccactaacactttctttttatggcgttcacgcaagaattttgccaatttacccacactggtggttttacccgcaccttgtaaacctgccattaagataactgctggtggttgggttgcaagatttaaactctcattggcttcgcccatggctttttcaagctcacgctgaacgatttttaagaattcttgccccggcgttaaacttttattgacttcttccccaagcgcgctttcttttacttttgcgataaattcacgcaccacaggcaaggcaacatcggcttcaagtaatgccatacgcacttcgcgtaaggtttctttaatattatcttccgttaaacggccttttcctgtgatattacgtaaggttttggaaaggcgatccgataaattctcaaacatggctaacaatcctgtttttcttaaaaaattgtgctgattataccgaaatttaggcgtttttcatcatttcaaatgaaaatgactttttgagtaggcgatttcataaagaaagtataggacataaggaaaaagaatgattatttagccaatttcaggtattattctgcccactcttggctatttgagtagccatttgatttagcaaaatcaaataacaggtaaaaagtgcggtaaaaaattaccgcactttttgttgattaacgaacaaaaggattttcccttggatagcattccccttagtactttatttattattcttattatctgtttagtgttatcagcctatttttctggttctgaaactggactactctccctcaataaatatcgtcttcgttttctatctgaacaaggcaataaaggcgcgaaaaaagcggaaaaactgctagaaaagccagataccttgttaagttttattcttatttttaataaccttgtgaatatcagcgcatctgcaattgcaacagtaattggtatgcgtttatatggcgatgccggcgtggcgattgcaacgggtttgctcactttcgtaatgcttgtattttctgaaatattccccaaaacggtggctgcaatgcacgcagaaaaagtgagctttttttcaagtcatattttaacttcattgcttaaaatcttttatccgctcgtttggttaatgaatatttttactaaatccttgatgcaaatagtagggttaaaacttgatatgcaaaaacaagtaattagtagtgaagaactgcgtagtattgtgtcagaagcgggcgaagcaacaccaaatgaacaacatccacaaatgttgctgtctattttggatatggagacagtcactgttgatgacattatggttccccgcaacgaaatcggcggtataaatattgatgatgattggcgagctattatgcgccagctcaatcacgccgcacacaatcgtgttgtactttataaaagtagccttgatgaacaagtacttggcattttgcgcgtgcgtgaagcattccgcttgctccttgaaaaaaatgaatttaccaaagaaaccttaattcgtgccgcagatgaagtgtatttcattcctgaaagcacgccattaaaaacgcaacttgcaaatttccgtacaaataaagagcgaattggcttagttgtagatgaatacggcgatattaaagggcttgtaactttggaggatattttggaggaaatcgttggggattttaccacttccaccgccccaagcattgacaaagaagtaattcaacagtctgatggttcaatgattatcgatggctccgctaatctacgcgatctcaacaaaatgtttaactgggaattagatacagaagatgcccgtacatttaatggcttaatcctcgaacacttagaggaaatacccgatgaaggcacgatttgcgaaattgatggtttgctaatcactattcttgaagtgggcgataatatgataaaacaggcgaaagtcgtcaaactttaatcataaaaaactccgccaaattgaaccgcacttttgacttggatcataagtgcggttcttttttgcgcattttttagaaaagatttttataatcctttataggtatattttgatagagcacaaagatatggaacacgaatatcaacgggcggtgactcgcgtgtgcgtacaaacggcactgctcttgttacaacatggggcagaaagtaccgtggtggtgcaaatggcgcagcgtttaggcattgcacttggcgtagaaagtgtagaatgtgcgcttacggcaaatgcagttgtgctgacgaccttatcagataatcattgcattactaccgcacgaaaaaatacagataaaggcattaatatgcaaatggtcacagatgttcagcgcattgtgattgccgttgagcatcatttgtatgagttagagatcgcacaaagaaaactggatcaattaaaaccgcttaaatataaccgatggttagtggtatttatgattggcttatcttgtgcagcattcgcccatttatctggcggcgattggataatttgcggcattacctttgtggcggcagccattgccatgtttgtgcgacaagaattttctaaacggcactataatccccttatcgtcttttccatcacctctttcgtcgcctcgctgatttctggcgtgagcttaaaatataacttaggtaacgatcctcaaattgctttagcgtctagtgtgttattacttgtgccagggtttccgctgattaattctttggcggatatattaaaaggttatgtgaatatgggattaggccgttggacgattgcaactattctcacttttggcgcatgtcttggtattgtattcgctttaagcctattacatattacaacttgggggcattaaaatgttattagacatcacaatatttatcttgaaattactcgatgatatgctatttgctgcgattccagcggtgggctttgctttagtatttaatgtgccgcccaaagccttaaaatattgcgcaattttagccgcacttgggcatgttacacgcacattattactgcatattaatatgcctattgtatttgcgacattctttgccacttgcgtgattggatttttgggcgtgcatctttcccatcgttatttagcccatcccaaagccttcaccgttgccgcaattatccccatgattcccggtgttcatgcttataaagcaatgatttcaatggtacaaattcatcattttggcttttctgatgctttatttgaacagatgattagttcctttattaataccagttttatcctaggcgcaatagtatttggattagcgttaccaggcttattgttttatcgacaaaaacctgtggtgtaacactaaaaacagtgcaacaaaaaagccgacatttgtcggctttctactattcttgtgattttttcttgaggtattcataaagctcatctttaatccgtaatttttcttttttcaaataacgatttccattttgtaatcaattcattatttaatgtttggcgtgcttgattattcacataacgaatgtattccacaaaaagttgatccacttcttcacgatcaaaagaggatagaattaattgattaagattattttcttgagaaaacttaaaatgcgaggcaatttgctgaacagtttcattttcaactttagctctcgctttcacaaaatcagattgatttaaaaaagccattaattgagcggatgaagtaagaatttttgtaaattcatgatacgcagaatctgtcgccttacgctcaatttttaccatatcaacggtatcagcatcaccactaactaaatggggcgtggattctaatacaaagtgcggtcaatttttctttatttttatacgttggcttttaaactggtttatttgaagaaagcacgctagaataaggttgttttcatttcaacgaaaaaagtaaggaaattctatgatcgatccaaatttactccgtaataatttagcagaagtcgcagaaaaattaaaagtaaaacgtaactttatgcttgatacggaaaaactcaccgcgttagaagatcagcgcaaaaacttacaagtcactaccgaaaacttacaagcggaacgtaatgctcgttccaaagccattggtgctgctaaagcgcgtggtgaagatatcgcaccattattggcagaaatggatgatatgggcaatcaattgactgaagcaaaagcacaattagatgcggtacttgcagaaatcaatcaaattgcattaagtattccaaatctacccgcagacgaagtgccattaggcaaagatgacacagaaaataaagaaatcttatgttggggtacaccgcgtacatttgattttgaagtgaaagatcatgtcactttgggtgaagaagcaaatggcttagattttgctgctggggctaaattaactggtgcgcgtttcgccgtgatgaaaggtcaaatcgctaaaatgcaccgtgcattggcacaattcatgttagatcttcatactgaacaacacggctatttagaaacctatgtgccttatttagtaaatcacgccacactttatggaacagggcaattaccaaaattcggggaagatttattccatactttagccttacaaggcgaacaaccttacgcattaattccaaccgcagaagtgccagtcactaatttagtgcgtgatgtaattattgatgaagcagaattaccaataaaaatgaccgcacatacgccatgtttccgttctgaagcaggctcttacggtcgtgatactcgtggtttaattcgtatgcaccaatttgataaagtagaaatggtacaaatcgttgatccagataaatcaatggaagcacttgaagaattaacaggtcatgcggaaaaagtattgcaattattaaatttaccataccgtaaagttttactttgcacaggcgatatgggctttggttcttgcaaaacttacgatttagaagtttgggtgcctgcacaaaatacttatcgagaaatttcttcttgctcaaatatgtgggatttccaagctcgccgtatgcaagctcgctgtaaagcaaaaggcgataagaaaactcgcttagtgcacacattaaatggttcaggcttagcggttggtcgtactttagtagctgtgcttgaaaactatcaaaatgccgatggttcaatcaccgtaccagaagtgctacgtccatatatgggcggattagacgttatcggcaaataatccttctagaagataaaaaagcgtggattttaaaatttccacgcttttttattatcaaagccttacaataactgttttaaattttttggtattcaagccaattaggaactttatcctattataaaattatatctataacatagaaaatttatctttcaattgacatcaatatccagagcattactctaaaaaacatatcaaagtatctaaattgttataatattagttcactttacgattaaacaatagtaagaagcaattttaataaattagatattccacgtataaaacagtataattccatcaatagctcataaaccaacaggagtattttatgaaattatatggtttaattggtgcgtgttcatttgttccacatgtggcattagagtgggtaaaaatacgtgaaaatgctgattatgaatttaaacctgtcactcgtgagttaattaaatcacctgaatttttatcattgaatccacgtggggcagtacctgtattagttgatggcgatttagttctttcgcagaaccaagcgattttgcactatttagatgaactttatcctaattcaaaattatttggtagcaaaaccgtacgtgataaagccaaagcagctcgctggttagcattttttaattccgatgtgcataaatcatttgtgcctctgttccgtttgccaaactatgcaaaagataacgaaacacttgcacacactattcgccaacaagcagtagagcaaattttagatcaacttgcagtcgcaaatgagcatttagaaagtcacatttattttggagaagatatttccgttgcagatgcctatctttacattatgctcaattggtgtcgagcagtgggtatagatttcagccacttaacacaactttcggcttttatgcaacgtgttgagactgatcaagctgtcgaaaatgtaagaaaaattgaagaactaaaagtataaacaggaagtttctacaaaaattgcccatttttaaccgtttgtatcacgttaagtttaaatttaagtgagtaatttcgcttcttacccaacacagctaaccaattgattctactatgattaaactggttaatccaatgtcgcaatgttctactgtcaagttgaaaatgtttactgatgagtgaataatttttaccattttaaatataaaattcgatgacttgttgtttgaaaagagtgttgtatttggctataaaaaatctgcatcttacaattaatttatataagtaaaaatatcttgcttttatcatcgttaaacttagaataaatataaataattatcattaagatttaagggtatatatgaatattttaattaataaacgtatctttttattagttacccttgtaggtattcaactaaatgtaaccgcaaaacaaaattcttctaattctaatagagaggagttattacctattattgtgaacactaatgatgatagtaataaactacctggtcgttcagtattaaaacagaaaaatatcgaacaacaacaagctgataatgcagcaaatttaattaatatcttgccaggtgtgaatatggctggcgggtttcgccctggtgggcaaacattaaatattaatggaatgggtgacgctgaagatgttagagtgcagttagatggggctacaaaaagttttgaaaaataccaacagggttctatttttattgagcctgaattattaagaagagtaacagtagacaaaggaaattattctcctcaatatggtaatggtggttttgctggaacagtaaaatttgaaactaaggatgctagggatttcttgcaagaaaaccagaaaataggtggttttttaaagtatggaaataatagcaataataaccaaaaaacttatagtactgcactagttttacaaaatgaacaaaaaaatattgatttattattatttggttctgtaagaaatgctggcgattataaaagacccgataatagcaaaattcttttttcaaaaaataatcaaaaaaccggattaataaaattaaattggcaaatttcacccgagcatttactcacattatcgagtgtttatggtattcataaaggctgggagcctttcgcagcaaaaagagatatcctacctaaaccaagtttgagtgatataatacgttatggtactgatatagcgtggaaacgtaaactggtttatcgagatcaaaaagatgaaaattacacattaaaatacaactatctacctgaaaataacccatggattaacttatctactcagttcagctacagtaaaaccacacaaaatgatactcgccacgaaaaagcctcttctgtattttcggctacactcggtaatcaaagctggataacttattcagatcttacttttgatataaataacacaagtacttttaatattaaaagcactcggcatgaactattatttggtttgcaatggttaaaaaacacaagaaatactttaatgtatcacaaggggaagatgaaagatgaaacctataattatggctatttccaacctttttatatgccttctggacgtcaatatacacaggcgttttatttacaagatcaaataaaatggaaaaatataatttttagcacaggagtgcgttatgaccatatcaataatatagggcagaaaaatttagcaccacaatataatgatatatctgtggggcataattatagtcagaaaaattataatggttggtcctattatttaggtcttaagtatgatgtaaaccattatttaagtttatttacgaattttagtagaacttggcgagcacctgttattgatgaacagtatgagacgcaatataagcaagcttctgtatctgcgacttctttaaatttagaaaaagaaatgattaatcaaacgagagtgggtggaattattactctcaatcatctatttcaggaaaatgatgcttttcaatttagaactacttatttttacaatcgcggcaagaatgaaatatttaaaaccagaggagttaattgtgtaggcaatgctgcagataccaataatgatgtttgtcctaaaatcattggaaattatcgtaatttgccaggttatgttattcaaggcgcagagttagaagcttattatcaatccacttatttatttggtgagataacatattcttatgtaaaaggaaaacgtgacacctcaccaagaaacccatggggtaaaacctcaacatggattgcagaaattccccctagaaaggcaactgctactttaggttttaatattcccaaatataattttacagctggctggcgtgctgagtttgtaagaagacaagatcgatcgccattatctggtgatcctaaagcaggatattggtcattgccagcttcaagaggatacagcctacataatctattcctttcttggagccctgcaaaaattaaaggtatgaatgttaagattacagtggataatttattcaatcgagcatacaacccttatctaggcgaattggcttctggaacaggtaggaatatcaaatttagcctatctcagaaattttaaaataaatagcccgattgaatctaatcgggctttatcataactataatttcctatactaattttagtattctttaaagagtaaatttaaataataaatccaaataagtacgacatcttaaattatagataaatatcaaaattatattttatctttaccctattactttccataatagaaactaaacttacctaaaaatttaaatataatttaaaatctagcatctagcttaacaacaaagtcaatacacatttcttctagttttcctttctttccgattaatatacctcaaaagataccctgttgttctcactaacttttctactataggaatagtattagaataagctatgaagaagaaagttaaaacagaggcattatgtaatataagttatttatataatttaacataactttccatataacaacaacgcatctttataacataattgcaatgtattctgttttaaatttatagcaattacctaaatagtaaagagtacaaataaagtacatataggctattaattactttaaaaaaattaaaatatatttgtagatttatggacaattacatttatcctttaaaaggtagttaatctagagaaatnnnnncattccattcattaattaattaatgaatgaatgnnnnncttggagccctgcaaaaattaaaggtatgaatgttaagattacagtggataatttawtcaatcgagcatacaacccttatctaggcgaattggcttctggaacaggtaggaatatcaaatttagcctatctcagaaattttaaaataaatagcccgattgaatctaatcgggctttatcataactataatttcctatactaattttagtattctttaaagagtaaatttaaataataaatccaaataagtacgacatcttaaattatagataaatatcaaaattatattttatctttaccctattactttccataatagaaactaaacttacctaaaaatttaaatataatttaaaatctagcatctagcttaacaacaaagtcaatacacatttcttctagttttcctttctttccgattaatatacctcaaaagataccctgttgttctcactaacttttctactataggaatagtattagaataagctatgaagaagaaagttaaaacagaggcattatgtaatataagttatttatataatttaacataactttccatataacaacaacgcatctttataacataattgcaatgtattctgttttaaatttatagcaattacctaaatagtaaagagtacaaataaagtacatataggctattaattactttaaaaaaattaaaatatatttgtagatttatggacaattacatttatcctttaaaaggtagttaatctagagaaattttttatagcaacacaacaagtttacaaggaattcaaatatttttaatttttagaaaaaacaaaaaccctagcttttcaactagggttctgtttttatgtgatttagatttgtatctgataacctggcggtgccctactctcacatggggaaaccccacactaccatcggcattacagcgtttcacttctgagttcggtatggtctcaggtgggtccaccgcactatcgccgccaggataattctttgataactcgtcttttctcttttatctctcgtctcttttatctctcgttactcagtctttcctctacctttcactcgttcttattggtcacaagctgaactcaattttctttctattaagtcttctatacttacttttctttgtttagtcttttacttcggtttccgctctacttttatttgcttcgcttttcatctcttacttcacttagctcccaaaaacacttgagcgttgtatagttaagcctctcgggcaattagtatctgttagctcaatgtatcactacacttacacaccagacctatctacgtcgtagtctacaacaacccttactgacttaaagtcagggatgactcatctcttggcaagtttcgtgcttagatgctttcagcacttatctcttccgcatttagctacccagcaatgcctctggcgagacaactggaacaccagtgatgcgtccactccggtcctctcgtactaggagcagccccaatcaatcatccaacgcccacggcagatagggaccgaactgtctcacgacgttctaaacccagctcgcgtaccactttaaatggcgaacagccatacccttgggacctacttcagcccnnnnncattccattcattaattaattaatgaatgaatgnnnnncgctacacgtggaattctacccctccctaaagtactctagttacccagtctgaaatgcaattcctaggttaagcccagggctttcacacctcacttaaataaccgcctgcgtgccctttacgcccagttattccgattaacgctcgcaccctccgtattaccgcggctgctggcacggagttagccggtgcttcttctgtatttaacgtcaatttgatgtgctattaacacatcaaccttcctcaataccgaaagaactttacaacccgaaggccttcttcattcacgcggcatggctgcgtcagggttccccccattgcgcaatattccccactgctgcctcccgtaggagtctggaccgtgtctcagttccagtgtggctggtcatcctctcagaccagctagagatcgcaggcttggtaggcctttaccccaccaactacctaatcccacttgggctcatcctatggcatgcggcctctcagtcccgcactttcatcttccgataatacgcggtattagcgacagtttcccgtcgttatccccctccataagccagattcccaagcattactcacccgtccgccactcgtcagcaagaaagcaagctttctcctgctaccgttcgacttgcatgtgttaagcctgccgccagcgttcaatctgagccatgatcaaactcttcaattcaagttcaatcgctcaataaactgcttagctataaataaaacactacttaaaaaaagtaatgatgaattttcagttaagcacctattaagacttcaaaattaaaaaatatttttaaaacaagtcaatcaacaagtgcccacacagattgtctgatatattgttaaagagcaaaataaagtggtcggcgagataggatttgaacctacgacccactggtcccaaaccagttgcgctaccaagctgcgctactcgccgtcagatcttataaagataagatggggtggctaatgggattcgaacccacgacaactggaatcacaatccagggctctaccaactgagctatagccaccattaaaagttgttattgcactgacctggcgcgctcgacaagattcgaacttgcgacctttggctccggaggccaacgctctatccaactgagctacgaacgcgttctgcgtcgttgcggaggcgtatattaatgatttaataaaaccttgtctagcactttttgaaaaaaaatgtttgagcgatagttttttattcagtttgtttaaaatacactattttttcgactatttttacaacttggcgaatcattatatatgttgaatcatccaacaattatgaatttgtttattacgttcaaaatctagcggtaacgttttatgcgaaatttctattgcacttaagcctaattcttccaacgcaactaaattcattttgaatccacgtttattattcgaaaaaacaattgtgccattattcgacaaaactcgttttaaattgcgcattaatttcacatgatctcgttgcacatcccaactctcttccatacgtttagaattcgaaaacgtcggtggatccgcaaatatcaaatcaaattgacgatcacatttttctaaccattgaaggcaatctgcttgaattaatttatgttgtttaccttcaatatcattcaaaataagattttgctccgcccaattaagataagtatttgacatatcaactgtagttgtcgatttagcgccaccaagtgctgcatgaacagtggcagaacctgtataagcaaataagttcaagaaatctttaccctttgccaactcaccaatcatttttcttgttaaacggtgatctaagaataatccagtgtctaaataatctgtcaaatttacccaaagttgcgtgccatattcattcacataaaagtattcgcctttattggctaacttctcatattgatttgtacctttttgtttctgacgaactttgaggatcaacttattcgtttccacacctgtcacttgcaaagttgcagtaacggcatctaacaaacgctgacgagctttattttcatcaatatttttcggcgctgcatactcttgcacaacaatgtaatctgcataacgatcaacagctaaattatattctggcaaatcagcatcatataaacgataagcgtctaattcttgttgctttgcccatttgctaattttcttaatatttttttgtaatcgattagcaaaatcgggggcgacctccgaagtgcggttaaattctagttccttttcatctgtaattgcgtcagattttcgttctgaaacttgataattcttttgcacacaatctagtgggccattttttgctttaaactgtcggctggcacgcattctcaaacaatcaagcaatgtggattcgctactaaaaacagaaacattccaaccgcaaaattcttttttaagtctttgcccaaatacagaatagagcgcgattaaagctggtgttgttcctaaacgttcgccataaggtggattacagataaccgtaccgacttcatttaaacgaggattttttaacgctgccacatcagcttgctgccatttaattaaatgtgaaacacctgcattttgtgcatttttctgcgccttttttaatacgcggtgatcgaggtcaaatccataaaagtgcggttgaatttcacgttgtttttcttctgctaattcaatcgcttcattttttactttttcccaagccgattgattatgcgctttccaaaaatcaaatccccaatgtaaacgataaagttgcggcgcaattttggcttccatttgtgccgcttcaattaaaagcgtacctgaaccacacattggatctactaatggagaacccacttgccaacctgaacgcataacaattgccgccgcgagagtttcacgtaaaggcgcttgacctgcatcttcacgatagcctcgcaaatgtaatgcttccccacttaaatctaaagaaatcactaaattttcacgattcaaataagcatggatacgtacgtctggctgaattttatctacatcaggacgagttttaccttgacgttcaaagtaatcgacaattccatctttaacgcgcatcgcaccaaattgagtatgacgaatttcttggttggttccattaaaatcgacaaagaatgtcactcgttcatcaaattgtgctaaccaattaaagcctgaaacagccgcataaagatccaaatcactgtaaattttggtttcaatcaaaggaaataaaatgcgtgaagcaaggcgtgaccaaagcaaagtgcggtataaagtttcgtcatcagcttgataatgaacgccaccttgaaccacttttgcctcttgcgcacccagttcagtgagttcaacttttaataattcttcaaagccacgagaagtcgttgcaaataattgtttcatttaggtaccgattttgaaaattttgagggattatagcatagaaaaagatgatctaattgagatcatcatagcgagttaaactgtaaaaagaaaagccctgattttcttaaatcagggctttagaatttgttggttgcgggggccggatttgaaccgacggccttcgggttatgagcccgacgagctaccaagctgctccaccccgcgtctgatggggcgtactatactcgcttaaaattgaattgcaagaattaaacaaaacttgatgtattgtttgttaataaaatgttcaatatgtggttttattaatcaacttcgctaaataacactggttgttttcagtaaattttgatagcgtatgcagccctattgtagcttactttagaattaaaaaatgtcgatgcttaaacctttctggttcaaaactttttctatctcaattattaccgcacttttggtagcttgtacctctaacacaaaaaacactcagattccaaccacctcaaatgggagtgatcctcaacaattcggtgcaaaatataccaatcgaacttatcagcaaaccgctcttgtgcctgtttcctatatagaaaaccaaagtgcggtaataaatcaaggcgattttttaacacagctttccaatataaaaaattattcaagtaaactttccacaaatttttacgataattatgaaaagattacaaattgggttctttctggagcaaatattaatgaactcactcaatttaatatccaaccgcaaattatgcgtggctttgatggatttcaaaatgtgctgatgacaggctattattcgcctatactttatgctcgtcattccccacaaggtcaatttaaaaatccaatttatcgtatgcctgtaaaaaaacgtctaagtcgagcacaaatttatgcgggagcattaacgggaaaaggattagagttagcatatagcgattcaatgttagaaaactttttacttggtgtacaaggcagtggctatgtagattttggcgatggtaatcttaactattttgcttacgcaggacaaaatggttacccttacacggctatcgggcgtttattagtagaagatggcgaaattccaaaagaaaaaatgtctattcaagcaattcgagaatggagtaatcgtaatccctctcgtgtacaaagcttgttagaacgcaatgaagcttatgtattctttaaaaatgatccaagtggcaaagtgaaaggctcttcgggcgttcctcttgtagcaatggcttcagtggcatcagatcacaatattatcccatctggttctgtgcttttagtcgaagtacccgacattgataataacggaaactggattggcacacacaaattacacttaatggttgcacttgatgtaggcggcgcagtgaaaggtcatcacttcgacttatatcgtggtatcggtgctagagcgggacatattgcagggctttcaaaacactacggtagagtatgggtattacggtaatggctagaatagataattacgaacaacgctttggtggcattgggcgactttatacgcctgatggcttagcacgcttacgccaagcgcatatttgcgtgattggcattggcggtgtcggttcttgggtcgtggaggccttagcacgatctggcattggcgaactcacattaattgatatggatgatatttgtgtcacaaatatcaatcgccaacttcctgcgatgagcggcacaatcggcaaattaaaaactgaagtcatgtcagagcgagtaaaattaattaacccagaatgtaccgtcaatattattgatgattttatctcgccagagaatcaatcggattatctcaatcgaggctacgactacgtcattgatgccattgacaatgtgaaaactaaagcgtcgctgattgcttattgtaaacgtaacaaaattaatgtgattactattggcggtgctggcggtcaaactgatccaacccaaattcaaattgccgatctcagtaaaactattcaagatccgctgctcgccaaagtgcggtcagttttacgcaaggattacaattttagccaaaatccaaaacgcaaatttagtatcgatgcgatattttcaacacaacctttaatattcccacaaatgacagaagactgttctatttcagccacaatgaattgcgcaaatgggtttggtgcagccacgatgattacggcaacctttggtttttttgccgtttctcgtgtaatagataaattactaaagaaaaaatcttaatcacctcttgaaaatgcacattgaccataaatgtgcattttttattgaatgaaacctattgactttgaaaatgaaaaattttccctctttttactataaaatcgttgcaatttatataaaaaggcgtactcttttttccttttgagaattactactaacaagtaaggaaacataaatatgaaaaaacttttaaaaattagtgccgtttctgccgcacttttaagtgcaccaatgatggcgaatgccgatgtattagcatcagtaaaacctttaggctttattgtttcatctattgcagatggcgtaactggtacacaagtccttgttcctgcaggcgcctctccgcatgattacaatttgaaattatctgatattcaaaaagtaaaatctgcagatttagttgtatggattggtgaagacattgattcattcttagacaaaccaattagccaaattgaacgtaaaaaagtgattaccattgccgatcttgcggatgtaaaacctttattaagtaaagctcaccacgagcatttccatgaagatggcgatcatgatcatgaccataagcacgaacacaaacatgatcataaacacgaccatgaccatgatcataaacacgagcataaacacgaccacgaccatgatcataaacacgagcataaacacgatcacgaacatcatgatcacgatcatcatgagggtttaacaacaaactggcacgtttggtattctccagctatcagcaaaattgttgcacaaaaagtagcggataaattaactgcacaattcccagataaaaaagcgttaattgcacaaaatctttcagattttaaccgcactttggcagaacaaagtgaaaaaattacggcacaacttgcaaatgttaaagacaaaggtttctacgttttccacgatgcttatggttatttcaacgatgcttatgggttaaaacaaacgggttacttcaccatcaatccattagtagcaccgggtgcaaaaactttagcgcacattaaagaagaaattgatgaacataaagtaaattgcttattcgcagagcctcaatttacgccaaaagtgattgagtctttagcgaaaaatactaaagtcaatgtaggacaactcgacccaattggcgataaagttactttaggtaaaaattcttatgcaacattcttgcaatctactgcagatagctatatggaatgtttagctaaataaatctttctaaaaacaatggccgcacataaaagtgcggtcattttctttgctaaatttgatatttagttttatctccaatatcaaaatgcaaaggcattcgccatttttgtatcgctaaaactaaaagtaatacgccagaaataatagaaaaaatgcgtagtgcaataagattatttaacacccacgaaaaccacaagcaagccacaaatatcggctgtaaatttagcaaaggcacgcggaaacaaaaatattctttaaaacacaaaccacctaaagtaagtaacgcaccgccaagagccaacgcaggataatgattaatataaaaaagtaatcctatccaagtagcaaattgaaaaagcaatcgaaaagattttaagtaaatgtgtaacgaagaggcacaacaggttgccgcaattaatataaatgtgagcgataaatctggataccaactcactgtaagaacagccaacgccgctatcacaaaaccagtgcggtaaataataacagtcagataatctaaaaaatccatcggtgatttaatatgtggatcagccattgtataaatgttcctttttatgaattacaaattaaaaataaatatagcctaaaagtcagaaataaaaagtacagtcaatttaaaaacacgttctaaattaaccgcacttttattatttcagttttagcttatcaagaattttttgatgaatgccaccaaaactgccgttagacatcactaaaatatgatccgtaggttgagcctctgcaacaatcatatccactaatcgatctaaatttgcattccaataagcaggttgtacacattggtttgcaatatctgccacttcccaagaaagttgttctggttgaagcataaacacttcatcagctcggccaagtgcaggcgcaatttcatctttatgaacccccattttcattgtgttagaacgaggttcaagcactgcaagaatacgaacaccaccacccactttatctcgtaaagcggttagcgtagcaagaatagcttctggatgatgggcaaaatcatcataaaccgtaatgctattaacttcgcctttcacttctaaacgacgtttagcattcacaaaagatcccaacgctttgcacgcatcttcaatagcaacgccagtatgatgagccgcagcgatcgccattaacgcattatgcatattatgttgtcccactacattccattttacttctgccactttttctccatgatagaagacagcaaaatgtgaagcatcatttgtaatacgttcagcaaaccactcgttatctttgcctaaaaattgctgttgagaccaacatcccaatgccaaagtttcttttgcactttgttcactcgccgaacttaataccaagccactggctgggatagttcgaatcatatgatgaaattggcgttggatcgctttgagatcatcaaaaatatcagcgtgatcaaaactaatattgtttacgataagtgtacgtggattgtaatggacaaatttcgaacgtttatcaaagaaagctgtatcatattcatcagcttcaataacaaaataagggctatctcctaaacgagctgaaatgccaaaattaccggctattccgccgattaaaaaacctggttttaagccattttgttctaagatccacgttagcatacctgttgtcgttgtttttccatgcgtacctgaaaccgccaatacccaacgatctcgcaataaatgatcatgtaaccattgaggaccagatgtatatttcaaattattttccaacacatattctacgcaaggattaccacgtttcatcgcattaccaacaattaccatatcaggcgcaggttgtaattgtgcaacatcataatttggaataatctcgataccttgctcttctaaaaaagtgctcattggagggtaaacattagtatcggaacccgttacgtgatagcccatttgtttagcaatcatcgccacaccgcccataaatgtgccacaaatacctaagatatgaatatgtttcattgtatttctctgttgattaaggaaaacgaaaaatatgataaaacaacttctatgaactttcaaaagaaaagaccatcataccaaactatatgatctataattaacgccactgaactattatttaaccacttcaataggaataaacaatgaaatttaagcgataaaacaatttcagaagcacaatggctcactatttacaaagaaaataatcagccattctatgtagcaaatcttcctgcattacaatttggaaaaacagttgcaccaaaagcaaatgaagtcgttaccttatcaaccgatgaagaagccgtgctttctcaaattcgtcctcacttataacaaggaaaaagtattcaagtcgatattattgggacttcaattcattttgctgacggtacccaaattggtttagtttcagaacaaaaataatcctataaaaaatgcctgtgtaaaacaggcatttttttatccgcacttttaagcaattcgctcaaaaccagctttcaaatctgcaattagttcatccacattttcaaaaccaatatgcacacgaattaatgaacctgtaagattacgtttaatatttggacgaatatgtgcaatttcttctggttgattacaaagaattagcgactcaaatcctccccatgaataagccatagcgaacagttgaaaatgatccataaattttgatacttgctctgaagttaatcgctgggttaattcaaaagaaaataaaccactgcttccactaaaatcacgtaaaaagaattcatgtccagggcaacttggtaaagctggatggtacacagtttttacttctggttgctcactcaaccattttgccactttaatactgctttcctgatgttgttttaatcgtacccccaatgtacggataccacgagcagtcgtataagcagaatctgcatcaaccatttgccccattaaataggaatgttctctaagttgatcccaagttcgcgcattcgcaacggcagtaccaatcataatatctgaatgacccactaaatatttcgtacccgcctgaatagaaatatcaatatcatgctctaacgctttaaatagaacaccagccgaccaagtattatcaatcataatcacaatattagggttcacctttcttgcagctttcacaatagtcggaatatcgggaatttccattgtaatagaactcggtgcttccaagaaaagtacttttgtattcggttgaataagcgttgcaatatcttcaccaataagaggatcgtaataagttatatcgatctgcatttttttcagcacaatattacagaaatattgggttggctcgtaagctgcaccactcattaacacatggtcgccagttttaacaaaagaaagaatcgaattagttactgctgctgtaccacaaggataaagataacaacctgcccccccctccatttcgcacattaaatcttgtaaagcaaaatgtgttagcgtccctcttctgccataaaataattcgccttttgctctacgttgagtagcgtattttttatcttcaatactgtcaaatagtaatgaagaagctcgctgtaaaacagggtttaccgatccttgtgaaaaacgttttttacgccctgcatggacaaatgttgttgagagattgtgttgttgcatatttccaccttattttagataagattaattgctttaatagataaaatcgagtataaaatgtcggcgtttcaaatagaatcgcaccgctattttgtgtggcaaaactttaacttaactttatataggaattatgactatggtattagtaacccgtcaagcaccagattttacttcatctgctgtattaagcaatggcgaaatcgttgataacttcaactttaaaaaacacattgctggaaaagctgcagtaatctttttctacccattagactttacctttgtttgcccttctgagttaatcgcatttgaccaccgttatgaagaattcaaaaaacgtggcgtagaagtagttggtgtttctatcgactctcaattcactcacaatgcatggcgtaacaccccaactgaaaatggtggtatcggtcaagttaaatatgcattagcggcagacgtaaaacacgaaattgctcaagcatacggtattgaacatccagaagcaggcgttgcattacgcgcttcattcttaatcgacaaaaatggcgttgttcgtcaccaagtagtaaacgatcttccattaggtcgtaatatcgatgaaatgttacgtatggttgatgcattacaattccatgaagatcacggtgaagtttgccctgctcaatgggaaaaaggtaaagaagggatgaaagataaccctgaaggtgttgcaaaatacttaaaacaaaacgctgataaactttaatccgtaattatttacaagaaagccacataatgtggctttttttatattcttagatactttagaataggcatatctctaacaccaagagcggttcatttctatgaaatttaatattcctattttcctaacgatctttcgagtcattttgattccttttttcgtgattgcattttatttacccattgaatcatctcctttcatcacaacgctcattttttttattgcaggtgtcactgactggctagatggctatctagctcgtaaatggaaacagaccacgcgctttggtgcatttcttgatcctgttgctgataaagtaatggtagtggttgcactagttttaattgtcgaacatcaacatacattttggataaccattcctgccattattatgatttctcgtgaaattatcatctccgcattacgtgaatggatggcagagcttggggaacgtagcaaagtcgcagtctcttggtggggaaaatggaaaaccacagcgcaaatgttagcactaggcggattattatggcgttataacaactatatggaaatagcagcaattatcttactttatatcgccgctattttaactatatggtcaatgatccaatatttacaagtagcaaaaggaagcttgctagataatattcaattataaatttaaataaaacacagttattttttatgataaccatctatatttgagttatttttaatcaaataaaatattttttatttttttcgtttgacagcaatatataaatccgtaaaatacgccccgttgtcacgcagtagtgctgattagtgataaatgcgggaatagctcagttggtagagcacgaccttgccaaggtcggggtcgcgagttcgagcctcgtttcccgctccaatttgcccgagtggtggaatcggtagacacaagggatttaaaatccctcgcctttcgaggcgtgccagttcaagtctggcttcgggcaccatttaaacaccaattcaaagattttaaaatttactttaaaattatctaattgggtcgttagctcagtcggtagagcagcggacttttaatccgttggtcgaaggttcgaatccttcacgacccaccacttaaaaataaagtaagcaccgaaaggtgtttttttatcatctaaatctctgaaactcatataaaaaatccccgactcaaagaatcagggacttttacaatcaaacgtctttaattaattaacgctcattccaacgtttaatagactcacgaatcacttctttcgcttcttctacatcgccccaatgggtcactttcgttgagccaggtttcttaagtgctttatagttattgaaatggaactcaatttgtttaattaagtttgccggtaaatctgctaatgaattgtaagcatttcctgtatcacgatcatctgcaggaacacaaacgattttatcatccacttcaccatcatcaacaaatttcatgacaccaattactttagcctcaaggaatacacctgttgctaatggttggcgagtgattaataacacatctaactcatcgccatcttcatctaaagtttgtggaatgaagccatagttagttggttttgcaaaaattgctggctcaacacgatctaactggaatgccgcaactttacggttccattcgattttatggcagctaccttctggaatttcatttactacattgataatgccagcatctacatcgcctggcgttaaaatttgattaaaatcagccattttgtttccttcattttatcaagttaaaaaacgcgacaagtatagcagtttttctgctgactcgcagtctcatttgtagagaaaatcagcaaatagattatttcataactattcataattttgaccgcactttatcctaaataaaagtcacgcaaacgtttacttatcgtttttatgatgtaaaatagcgcaccttattacttccaattttttacttaacttcaaggaacactatgccaactttagaaaaaacatttgagctcaaacaacgtggttcaactgttcgtcaagaaattatcgcgggtttaaccacgttcttagcaatggtttattctgtcatcgtggtacccaatatgctgggtgctgcaggttttcctgcggaatctgtctttattgccacctgtttagttgcaggattaggctctatcttaatcggcttatgggcaaatgcaccaatggcaattggttgtgcaatttctcttactgcttttacagcatttagcttagtgattggtcaaaaagtcgccattcccgttgcgctaggcgcagtattcttaatgggggttgtgtttaccttaatttctaccacaggtatccgtgcatggatcttgcgtaatttaccatccaatatcgctcatggagcaggcattggtatcgggctctttttacttttaattgccgcaaacggtgttggtttagtcgtcagcaaccaagctggcttaccagtaaaattaggcgatttcacctcattcccagtcataatgtccttaattggtttagcactcattatcggccttgaaaaaatgaaaattaaaggcggtattttatgggtaattattgctattactattgtcggtttaatttttgatccaaatgtaaaatttggcggagagattttcaaaatgccaacctttggtgaaaattctctcttcttacaattagactttatgggcgcactacaaccagcaatcttgcctgtggtatttgctttggtgatgactgccgtatttgatgcaacgggcactattcgcgcagttgcaggtcaagcagacttgcttgataaggatggtcaaattatcaatggcggtaaagccttaacttcagactcaatcagtagcttattctcaggcttattcggtacagcaccagctgccgtttatattgagtcagcagcagggacagcagcaggcggtaaaacaggtattactgctatcgttgttggtgtgttattcctattaatgcttttcttccaaccattagctttcttagtgccaggctacgcaactgcccctgcattaatgtacgttggtctattaatgttgagtaacgtaagcaaattagatttcgatgatttcgttggagcgatgagcggattaatctgcgcagtgtttatcgtacttaccgctaacatcgtaacaggcattatgttaggttttgcggcattagtaattggaagaatagtgagtggcgatattaaacgcttaaatgtaggtactgtgattattgcaatcgtacttgttgcattctatgcaggcggttgggcgatttagtaacagaaataagaaaagggaaaagccttccccttaattttaatcacaaaagtgcggtgaaattttaccgcacttttttatacttggattactctttcttcaataagaaaataccgtgatgaagttcacagtttttaaaattcaagtgaaaaaataaacgtgaaattcaccgcacttttctttataattgcaagaattttccttacatcgaaacacgattatgtcaaatccctcttgtatcatcatcgccatcacaggtgcatctgcatcaggcaaaagttctatcgcttccactgttcacaaagagctctgtaatgaactaggctgccaagaaattggtatcattactgaagacagttactataaagatcaaagtcatttagaaatgactgagcgggtaaaaacgaattacgatcatccaaactctatggatcgcgatttacttatccaacatttaaaaaatctaaaaaatggcagtgcagtagatgtgcctgtttatagctatgtagaacatactcgcaccaacgaaacaacgcatttcacaccaaaacgaatcgtaattttagaagggattttattacttaccgatgaacgagtacgccaattagccgatatttctgtattcgtagacacaccacttgatatttgtttcatccgccgtttacaacgtgatatggaagaacgtggtcgctctctacaatcagtgattgatcaatatcgtgcaaccgtgcgtccaatgttcttacaatttattgagccgtctaaacaatatgcggatattgtcattcctcgtggtggtaaaaatcgcattgcgatcaatatgttaaaagctcaaatccttcatttattgaatcaaaaataggaaatcttatgcgtctttgcgatactgatattgaacgctatctcgatgatggcattatttctttaacaccacgtccaaataatgacaaaatcaatggtgcgacaattgatgttcgcttgggtaattctttccgtgtatttcgtgaacactctgcacctttcattgatttaagtggcccgaaagaagaagtctccgcccagcttgaatcagtaatgagcgatgaaattattattccagagggggaagcatttttcttacatcctggtactttagccttagcaaccacgcttgaatccgtgaaattgccagccaatattatcggttggttagatggccgttcttctttagcccgtttaggcttaatggtacacgtcaccgcacaccgtattgatccaggttgggaaggaaaaatcgtgctggaattttataattcagggaaattaccattagcattacgcccaaatatggtaattggtgcgttaagttttgaagtattaagtggcgaagcaaaacgaccatacagcagccgcaaagatgcaaaatataaaaatcaacaaagtgcagtagccagtcgtattgacgaagacaaggaataatcaatgaaaaagttcgcacttatcgtagggatcgtcttcttggcgatcttttcttttttatatattcaactttaccgcgtgcaaagtgctattaatgaacaactggcacaacaaaacattgccgttcagtcaatcaatttatcattattttctcccgcactttcccttgaaaatataaaaactacgcaattttcagctcaaaaaattgaagctaaatttagttttttgcctcttttgtatggaaacgcagcacttcattcactgaatattcaacagctcaaattaactcaaaacacacaaaatcctgccaatgtatcgatagaggtttcgcctttttcattaaaacagcttttatcaaaaaaagtaatattaaatggcgaaaatcatattcgcattgaatttaataaacctatttatggaaaaacaaaaactttccatttttctttccataaagcgaatttagacttctcaacatcagaatcagccccacttcaatttgtagatgcaagcctaaataatcagcctatcggttatattgaaactcacacagcccaccaacaaatagtgacttatataaaaccacaatgcgataacgattgtttagccgtattgaaatatcaacaaatagacaatcaaagtgcggtaaatttttcgggtaaatatttccctgttcaacgcttattcgcactattaaatttgccagaaatgttaagtggacacgctgattttgatcttgatttcagcttttcatcttcctcgcttattcaaggaaaattaaattttttagcgcaaaatggcgaaattcttggtgtgaatctattggatatggtagcgcaatatttcccgattaattacaacaatgatttgttacaaaacaaagaattaaacactcgctttgaacaattttacttacaattatttctccaacaaaatcaactcattgctgaaaaaatcgaattaaaaacgcccgcacttttggggcaaggaaaaggcatcattgatttaaatcgaatggaatgcaatgtggatattaatttaaattctacggatcaacgctatcaaaatttaaccctgccaatcaatttttttggtaactgcaattctccacaatacaaaattaattttacgaagaaattccgccatcaattaattgatgcgattaaagaaaagttacgttaatgtcgttatatttaaaagctgaaaaaatccaatcatggcgcgtgcttattatggcttgcgcaggatttatttttaatactacagaatttgtacccgttgcaatgttaagcgatattgcacaaagttttgatatgcaaactgctgatactggtttaatgatgaccgtttatgcttggacggtgctaattatgtctttacctgcgatgcttgccacgggcaatatggaacgtaaaagtctgcttattaagcttttcattatatttattgttgggcatattttatcggtcattgcatggaatttctggatactacttctcgctcgaatgtgtattgcattagcacattcggtgttttggtcaattactgcctcacttgtgatgcgcatctcacctaaacacaagaaaactcaagcattaggaatgctcgctattggcaccgcacttgccaccatcttaggcttaccaattgggagaattgtcggacagcttgtcggttggcgagtcacttttggcattattgcggtactggcattatccatcatgtttttaattattcgattattaccaaatttacccagtaaaaatgctggctctattgcaagtttacccttgcttgctaaacgtccattattactttggctttatgtaacaacggcaatcgtcatttcagcacattttactgcttatacttatatcgaaccatttatgattgatgtcgggcatttagatccaaattttgccacggctgtattattagtttttggtttctcaggtattgccgcaagcctattatttaacagattataccgatttgctcccacaaaatttattgttgtttcgatgagtttattgatgttctccctcttactactcctcttttcgaccaaaacaataatagcaatgttcagccttgtgtttatttgggggattggcatttcttgtatcggactatctctacaaatgcgcgtactaaaacttgcgccagatgcaaccgatgttgccacagctatttactcgggcattttcaatgcaggaattggcgcaggcgcattatttggaaaccttgcgacaacctatttaggattaaatgaaattggttatacaggcgcaacattaggtttaatcggtctcattatttttattacaacgcacttaaaatatcgccatacctttcttctacaaaacaataaaaaaataaccgcactttagttctccaaaaagaatcctaaaagtgcggttaaatctgtctaagttttatttatcttgcgtttaacgtttcgctttcttaataaacttcatcaaacgtttacgtttacgcaattggttcggagtgagtttatttttgcgtcctgcaaatgggtttgagccttcttggaaaagcagacgaatcggtgaaccaataatttttaagctcttacgataataattagataaataacgtttataagaatctggtaatttatccatttggttaccgtgaaccactataatcggcggattgtaaccacctgggtgagcatattttaatttaatgcgacgaccgccaatcatcggcggttggtgctcatccgttgccatttgcaaaatacgagttaaaagcgaagtcgtcattttttgagtggcacaagcataggcttctttaatcgaatcaaaaagattacccacaccacttccgtgcaaggctgaaataaaatgcacccgagcaaaatcaataaaatctaaacgacgatcaagctcagatttcacacgatctttcacatcttgatctaaaccatcccatttattcacgacgatcactagagaacgccctgcatttaaaataaagccgagcaaagataaatcctgatcagaaatgttctctctcgcatcaatagtcagcaatacaacattagcatcttgaatcgcttgtaaggttttaatcacagagaatttttccactgccaaatgcactttaccacgcttacgcacaccagcggtatcaatcaaggtatattgctgtccatcacgctccattggaatataaatactgtcacgtgtcgtacctggcatatcaaaaaccaccacacgatcttcgcctaaaatacgattggttaaagtagatttacccacattggnnnnncattccattcattaattaattaatgaatgaatgnnnnncgtagaattaggtggtcgtttaagcattatcgcagaacaaagtaatagcactgtagataatcaaaaacagcaacacggtgcattacgcaatcaaggttcacgtttccacattaaagcaactcataacttcggtgatggtttctatgcacaaggttatttagaaactcgttttgttacaaaagcctctgaaaacggttcagataacttcggtgatattacaagcaaatatgcttatgttactttaggaaataaagcattcggtgaagtaaaacttggtcgtgcgaaaactattgctgatggcataacaagtgcagaagataaagaatatggcgttctcaacaatagtgactatattcctactagtggtaataccgttggctatacttttaaaggtattgatggtttagtattaggcgctaattatttattagcacaaaagcgtgagggtgcaaaaggtgaaaataagcagcctaatgataaggctggtgaagtacgtataggtgaaatcaataatggaattcaagttggtgcaaaatatgatgcaaacgacatcgttgcaaaaattgcttatggtagaactaactacaaatataacgaatctgacgagcataaacagcaattaaatggtgtattagcaactttaggctatcgttttagtgatttaggcttattagtgtctctagatagtggctatgcaaaaactaaaaactataaaattaaacacgaaaaacgctatttcgtatctccaggtttccaatatgaattaatggaagatactaatgtctatggcaacttcaaatatgaacgcacttctgtagatcaaggtgaaaaaacacgtgaacaagcagtattattcggtgtagatcataaacttcacaaacaactattaacctatattgaaggtgcttacgctagaactagaacaactgagacaggtaaaggcgtaaaaactgaaaaagaaaaatcagtgggtgtaggtttacgcgtttacttctaatcatttgttagaaatacattattaaaagcaaggcgaatcgaaagattcgctttttttgctcaaaatcaagttaaaaaatgattaagttaaaagtgtataaatatttaggctattttataagtaacaaaatattaataaaaaatctgtgacatatatcacagatttttaaatcaattaactatttaagtgtttactattaattctctttccactttccgtttactactgtgccgattacttggtaatttggcgtaaacacggctaagtttgctatcttacctttttctaccgaacctaaacgatcatctataccaattgctcgtgcaggataaaggttactcattctaatggcttccgcaagaggaatttcaacatattctaccgcatttttaatagattccatcattgtgattgatgcccctgcaattgtgccatttgcatcatagcaacgcccttctttgatataaattgtttttcctacaaaggtaaaactttctagttctggcggtgcgcctgcagctgcaatagagtcagtcacaatacaaagtttgtcgcctttgatttttttatcaatgcgaacattgccgtaattgatatgcacaccatcgacgataatgccagtgtaaacatcagaatctaatactgcacccactacgcccatttcacgtccagaactaattggcgacattgcattatgcaagtgagtcgcaaaagttgcgcctttatggaatgcggctttagccacttcataagtggcattagaatggcctacagagacaataatgcccgctttcacaaaatcaggcgtatagttaatggttgggttttctgcggcaatggtcatttttgtaatgacatcgccattttggcagagaaaatctttcatttcaggcgtaatttcacgaatatattcgggacggtgtacaccttttttctcaatgctgagataaggcccttcaatatgtaaaccaagtgcttggtttttatgcttgtttaaatattcacgcataatttttaccgcactttttatattttcatcaggcgcggtaataaaagtgggaaggaaacttgtacaacctgattttaagttagtttcctgcataatttccaaggtttcaacgctggtttggtcgttaaacatcacgccaccacagccatttaattgcagatcaataaaaccagcagttaaattattaccttgtaaatcaatggttttgatacctgtttctaattcagcttggggaactaccgcttcaataatttcaccgttaataattacagcaaaatcacgtaaaacatcatattttgtgtaaattacacaattaattaatgcgtatttcatattctgttcctaatatcaacatcagtttaacatagcaactatattgctcttaaacgtaaggacaatttgccctatgattgtttgtgattatagggcgaatgtaattcgcccctacataaagatgaagaatagatctctatttatcctgataatccgtaccagcaaccgcgccttctaattcagtaaaatatttcacggttttcacttttaactcttgttgagcagcttcatcacaaacaagcaagaaatgacggtgcatttgtaatgcactgactgtccataagtggttaatactgccttcaacggcagcttgcactgccagtgctttttgatgtcctgttgctaaaatcatcacttcttctgcatctaataatgtgccaacaccaatggttaaagcatatttcggcacttgagtaacatcgttattaaagaagcgtgaatttgcaattaatgtatcttgcgttagcgttttaatacgggtgcgagaacttaatgaagaagcaggttcattaaatgcgatatgtccatctacgccaaccccccccataaacagatgaattttgccgtaggatttaattttttcttcataacgatggcattctgcattatggtcatcggtattgccgttaagaatattgatattttcaggtaaaatatcgatatgattgaaaaaattgttatacataaagctgtggtaactttcagggtgttcctctggtaaagccacatattcatccatattgaaagtcactacgtgtttgaaactcactttgcctgcttgatgaagtcgaatcagttcttgataagtttttagtggtgtaccaccagtaggtaaccccaatacaaaaggacgctcggcggtaggtttaaaatcgttgatacgattgatgatatgttgtgcagcccaacaactgacttgttgttctgtttgtaatggaataaaacgcatattagccttcctttattattgaccgtgatgatcctattcatatcgtaggctggactttagcccacctataccaaaggatcattataagtgcggtaattttttatcttgtttttaaaaagaaattcttttgctccaataattcacgacagagcaatagaagttgcccccttccgcccttcgggcaccttcccccgtaaacaggggaaggaaagtgcttgcttacttgttgttctgtttgtaatggaataaacagaggaaggtaagtttttctaatttaaatatttatgacaaaaatttcgctttcaagtcttttgcttttgcaacctgttctgctgttgcttttgatgtcattggttcacggcaataacctgcatccaccccttctaatttaagcaattctttgatggttaaatataaaccgttcgctaaaatgccttcgattaaatcgttggttacgtgttggatttctaacgcttcggctaatttacccgctttggttaattcaaaaatttgacgagcacgaacgccgtttacgttgaaagttgaaccaattgcaccatccacaccaagtgaggctgccggtaacatcatttcatcgaaacctgcccaaattaagtggtttggataagcttttttcaaacgttctaataagtagaaatcacctgctgtgaattttacccctaatactttcgggtttttgtaaagttcaccgaattgttcaatacccatattcacgccagttaagaacgggattgagtacacgatcatattgttgcccgtttcagcgatgatggtgtcgtaataatgtttaatttcagggaagctaaatttgtaatagaatggcgtcactgcagataagcagtcgtagcctaattctgttgcatatttacctaattccactgcttcttttaagtttacgctgcccacttgagcaattagtgcgatttgatcttttgcttcatcttttgcaatgcggaagatttcttttttctcttcaattgaaagcataaagttttcgcctgttgaaccgcccacatataagccatcaactttcattttgtcgatattatggcggataatttggcgtaaacctttttcattaattgtgccatcttcattaaatgacactaataatgcactgaaaataccttttaaatcacgcataagttttctcctattttatacgttgttcaagaattacattgagagttttttgtttagtttgagcggcaatttcttcttcgccctgcactaacaaagcataaattaaatctaatacaaaaagctgtgcaattttggtgccaatagaatcgccttgtaacttgccttgtttattaccatttaccaaaacataatcagcatattctgtcacgggggaacgcaaactatgcgtcaatgccactgttgttgcaccattttgttttgcgattttgatggtatgtgccgtttcagcagaataaccagaatggcttaaaccaattgccacatcagaagaggtcaataatgccgcctgcatatacataaaatgattattacctgaagcatccacttgaaaaccaatacgcatcagcttatttttagcatcttcagccgttacgccagatgaacccacaccaaataaaaagatacggcgtgcttttttaagtactttaacgacttcttcaagctgttttaaatcaagtaaattaatcgtttcttccattacattagcaaccgccgtttgcaatttttgtgcaatagtgagcgaatcatcacttggcataatttctgtttcaagtatgctttcatcttgattatctttcgttgcaagttcaatagaaagctctagtttgaactcactgaaacctttaaaaccaatggttcgacaaaaacggacaagcgtagcttctccaacttgcaaatgtttagcgatttctgaaagggagcattgagagactaaatcaggcgaacgcaaaatcgtatcggcaatttttttctctgatttagttaaactctggtaaagtgagccaattttgtttaacacatttcccgatttagccataaattgttccttcaggcttatccagtaaaacatcttttacccaataagctgcgccaattaaacctgcatcttgtccaaatttagcggtttcaatttcacaacaatatatcgaaggaaaatcttgtaaatatttttcaaccaaagataaatagccctcagctaatcccacactgccaccaattgcgattttttgaatatctaaactaatcactaaatcagcaattaaattagcaatggctttcgcagaacgctcgacaagtgcggtcgctttttcatcattttttctaaaacgttcaaacacttcttttggatcgcacggatcttcccattgggaagaaactgcttcaattgctcgccctgaagcaatcgcttcgacgcaacctcgacgcccacaaccacagatcgcaccatttggatcagctaatgtatggccaatatgcccagcaataccacgagaacctgtctgcaaaatttggttcagcacaatccctccgccaactcctgttgaaacggtaataaaaacaaaatttgatacctgttcagaattttgcaattgatattccgcataagtcgcagcttgtgcatcatttaataaaccaatcggtttatccgtatgttttgcaatactcgctttaagtggaaattccgccaagccacctaagtttttcggatttaatgcacttaaaatgccattattgataatccccgtagatgctaccgctacataatcaaactgcccttcataatcagcaagcaatttgcctaacgcttggtgcattccctccacgacattttcacgtggtgtatgaatttgctgacgttgctcaatttcgccattttttacaatcgccgcagcaatttttgtcccaccaatatctagtgctaaacaacgcataacttatccttatagtgtaaagtcttttctcacacgtcttacgactatcttgcagatttcactgaattagcaaaccaactcacaatatgttcaagacgagttaaagctgaacctacagtcacgcaatctgcaccaatttcaattgccacttttgccaattctggtgtgttataacgcccctcagccatcacaaaacaacccgctgattttaaatctttcactaattgataatctggttcttttggcactgcgccacctgtataacccgacatcgtactgccgacaatatcaaaaccaagcgctttacaatacaagccttcttctaaattagaacaatctgccattgccaaacagcccatttcgtggatttttttcaccgcactttcaatatccacaggacgcgggcgtttagtgccatctactgcaataatatccgcgcctgcattggctagatcttcaatatcttgtaaaaacggcgtaatacgcacgggactatcaggcaaatcacgttttacaattccgataatcggaacattcacaaaaggacgggttgctttaaggttatcaaccccctcaatacgtaagccagaagcgccgcccataaccgaagcctgagccatagcagaaacgatttcaggtttatccattgggccatcatcgacaggttggcaagaagaaataagaccatattgaattgagaaagcacttcttgataagataattagnnnnncattccattcattaattaattaatgaatgaatgnnnnnttcttgccccgccatttctttaggcgtatcttctgctgttcttgccgctgattatgacttgaaattcggtatgaatgctggaacttcatcaaatgaatataaagcggcagaaatgtttgccaaagaagtcaaagaaaaatcacagggtaaaattgaaatttcactttatccaagttcacaattaggtgatgaccgtgcaatgttaaaacaattaaaagacggttctctcgactttacctttgcagaatctgctcgcttccagctgttttaccctgaagcggcagtatttgccttaccttatgttattagcaactacaatgttgcacaaaaagccttattcgatacagaattcggtaaagatttaattaaaaaaatggacaaagatcttggcgtgactttactttcccaagcttataacggaactcgccaaacgacttcaaatcgtgcaatcaacagtattgcagatatgaaaggcttaaaacttcgtgtgccaaatgcagcaacaaacttagcctatgctaaatatgttggcgcatcaccaacaccaatggcattttctgaagtttatcttgcgttacaaaccaacgccgtcgatggtcaagaaaacccgttagcagcggtgcaagcacaaaaattctatgaagtgcaaaagttcttagcaatgactaatcacattttgaatgaccaactttatttagtaagcaacgagacttataaagaactccctgaagatcttcaaaaagtcgtaaaagatgctgccgaaaatgcagcaaaatatcacactaaattattcgtagatggagagaaagatttagtcacattctttgaaaaacaaggcgtgaaaattacacatcctgatcttgttccatttaaagcatcaatgaagccgtattatgctgagtttgtaaaacaaactggtcaaaaaggtgaatcagctttaaaacaaattgaagcaatcaatccataatccctctttagtgtgccgtaatggcacactacattcccttattcttcatcaaacggagtgaagtatgaaatatattaataagcttgaggaatggctgggtggcgcattatttatcgccattttcggtattcttatcgctcaaattctttcacgccaagtttttcattctccgttaatttggagtgaagaactcgccaagctcttatttgtttacgtgggtatgttgggtatcagcgttgctgtgagaaaacaagaacacgtatttattgattttttaactaatctaatgcccgaaaaaatcagaaaattcacaaatactcttgtacaattattagtctttatatgtattttcttatttattcatttcggtattcgtacttttaacggtgcatcattccctattgatgccttaggaggcatttctgaaaaatggattttcgcagcactgcctgttgtcgcaatcttaatgatgtttcgctttatccaagcgcaaaccgtaaactttaagactgggaaaagctatttacctgcgactttctttatcataagtgcggtcattttatttgcgattttatttttcgcaccagattggttcaaagtattgcgtattagcaattatataaaactcggttcaagttcagtctatgtcgccttactcgtttggctaatcattatgtttatcggtgtccctgtaggttggtccttatttattgctactctactttatttttctatgacacgttggaacgtcgtaaatgccgcaactgaaaaattagtctatagcctagacagcttcccattacttgccgtgccattttatattttaacgggcattctaatgaatacaggtgggattaccgaacgtatttttaattttgctaaagccttactcggtcattacacaggaggaatgggacacgttaatatcggcgcaagtttattgttctctggtatgtcaggttcagcacttgctgatgcggggggcttaggtcaattggaaatcaaagcaatgcgtgatgctggttatgacgatgatatttgcggaggaattactgctgcttcttgtattattgggccattagttccgccaagtattgcaatgattatttacggtgtaattgccaatgaatctatcgcaaaactctttattgcaggttttattccaggtgtattaattactttagctttaatggcaatgaattatcgcattgcaaaaaaacgaggttatccacgtacaccaaaagctacgagagaacaactttgcagcagctttaaacaatctttttgggcaatcttaacgccgttattaattatcggtggtattttttcaggcttattcagtccaacagaatctgccattgttgcggcagcatactctgtaattattggtaaattcgtgtataaagaattaaccttaaaaagcttatttaatagttgcatagaagcaatggcaattacgggcgtagtcgccttaatgattatgactgtgactttctttggcgatatgattgcccgtgaacaagtcgcaatgcgtgttgctgatgtgtttgttgccgttgccgattcgcctttaaccgtattgataatgattaacgcactgctactttttcttggaatgttcattgatgccctagcattacaatttttagtattaccaatgcttattcctatcgcaatgcagttcaatattgacttaatcttctttggtgtaatgaccacattaaatatgatggttggtattcttaccccaccaatgggaatggctctctttgttgttgctcgtgtaggaaatatgtcagtttccacggtaaccaaaggcgtattaccgttcttgattcccgttttcgtcacattagtattaatcacgattttcccacaaatcatcacatttgtgccaaatctattgataccataataaaaagtgcggttgaaaaacattaaattttttaaccgcactttcatcgttttcgtaagttacatctgctgtatcttacaatacaaaagggtgcaataactgcactttatcaacgcctattcaatgccgtttaatgaatagaaaactgtaaacacaactcaaaatggggtttattatgaaactaactaaaacagcattatgcactgcactttttgccacctttactttttcagcgaacgcacaaacttatcctgatttgccagtggggatcaaaggaggaacaggcgcattaattggcgacaccgtttatgtgggattaggttctggtggcgataaattctataccttagacctaaaagatccttcagcacaatggaaagaaattgctacatttccaggtggcgaacgcaatcaacctgttgcagccgcagtggatggaaaactttatgtattcggtggtttacaaaaaaatgaaaaaggcgaacttcaactcgttaatgacgcttatcgctataacccaagcgataatacttggatgaaacttcctactcgttctcctcgcggcttagtaggatcaagtggcgcatctcacggagataaagtttatattttaggcggctctaacctctctatatttaatggtttcttccaagacaacgttgcagcaggagaagataaagggaaaaaagatgaaatcgttgcagcttacttcgatcaacgtccagaagattatttctttacaacagaattattgagctatgaaccctcaactaacaaatggcgcaatgaaggtcgtattccattctctggtcgtgctggtgcagcctttacaattcaaggtaatgatctagtggttgtcaatggcgaaattaaacctggacttcgcaccgctgaaacccatcaaggtaaattcactgataaaggtgtgcaatggaaaaacttacctgacttgcccgcaccaaaaggcaaatcacaagatggtttagctggtgcacttgcaggctatagtaacggtcattatttagtcactggtggcgcaaattttccaggttcaataaaacaattcaaagaaggaaaacttcacgcacataaaggtttaagcaaagcttggcataacgaagtttatactttaaataatggtaaatggagcatcgttggggaattaccaatgaatattggctatggtttttctgtatcttacaataataaagttttactgattggcggcgaaactgatggaggtaaggctttaactagcgtcaaagcaatcagctatgatggtaaaaaattaaccatcgaataatttatcacagaataattcataaaatttataataatcaaaagcggcgaaatttatcgccgctttatgcaaaataaaagtaattaaagcaaaattaacacaaattttgaccgcactttaaatgctctataaagagctggcatttttattaataagatttagcgatgttatttattccaccaccactactctgtttattcattgccatagcaatgtattttttgccaaagattgctagttattctgtccatttttcagtgattgtttttgttatttccctttcatttttgattgctttaagcagcgttatgcaattctttatatgtaaaacctccattaatcctcgtgactttaaaggcacaacaaaattagtttccacaggcatatttcgatttagccgtaacccaatgtatttaagtttgctgttaatgttaattgcgtgggctctttggttaggtaatagtttggcttggttaggcgtgattgtctttatactagttatgaaccactgtcaaatagcccgagaagaaacctatttggaaagtaaatttggcgatgaatatcgtcgttacaaacaaaaagtaagacgttggctataaaaaaacaccttcacgaggaaggtgtttttatcaaattaaactctattttttcggtgcctgcataaagcggaagaaatcactatctggttttaaaatcattatattgtcagaatttgcaaaactcgcttcataggcttttaagctacgcacaaaagtaaaaaattctggttcttgagcaaaagcatctgaatataattttgctgcagctgcatcgcctgaacctcgtaattcttgtgcagttttatttgcattagcaagaattaacgtcactttgcgatctacatcagcttgaataaatgctgctttttctttcccttgagaacgatgttcacgcgccactgcatcacgttctgcacgcatacgttggtaaattgaagaagagacttcatctggtaaattaatttgttttacacgcacatcgatcacttcaatacctaattctgccgtactgtcttgtcctgaacttaaagctttttttgccccttccattaattctccacgtgtaccagaaacaatatctttaatcgtgcgtgaaccaatttcagaacgtaaacggtcgtttactttacgacttaataaatttgcagcttgagcataatcgccaccgccagtagatgtgtagaatcgaccaaaatcactgattttccatttcacataagaatccactagcaaatcttttttctcaacagtaacaaaacgtgttgcagagccatctaaagtacgaatacgcgcatctaaaactttgatgctatcaattaaaggtactttaaaatgcaagcccggttcatatacaaccactttgttatcagcatcacgctgtactttgttaaatcgtaacataatgccacgcgtaccttccgttacaacgacgatactagaataaacgactgccgcaatcacgaaaataacaggtaataaaaatctacgcattagttaaatctcccttgacgaatcggcgcaacggtagtcggctgaggctgataagaattttgacgttctggtgcagtaaaagcaggcgaagaattgaccgcacttggcgcacttgttaccgattttttgcccataatttgctctagcggtaacacagttaaattattaccattattgccatcaagcattacttttggggtatttgccatcactttttccatcgtctgaatatataaacgctcacgcagtaaatctggcgcagccttaaattctggcaacaagcgttgcaaacgttccacttcaccttttgcatctaacacgatacgatctttataagctgttgcttcttcaagaatacgttgcgcatcaccgcgtgcaatcggttctttctcacgcgcataggcttccgcttcacgaataaaacgttgttcatcttcctgcgctttaattgcatcatcaaacgcatcttttacttcttcaggtgggcgtgcagattggaagttcacatcaataacctcaagtcccatatcataggatttgataatttcattcaaagctttccaagtattttcacgcacgacagagcgacctgtggttaaaatatcattcatagacatatgtccaataacataacgtaatgcactatctgtcgcttgattcaaactatcatctgcatttgttacgctaaaaagatattttgcaggatcttgcacacgatattgcacggtcatttccacttttaccatattttcatcttgagtcagcattgcaccttgtgtacgcaactcttttacttgctccacatttactggcaatactttatctacaaatgttggtttccagttcaaaccaggttgaacaatagaatgtaactcgccaaaacgaagcaccacaccgcgttcagcctctttaatggtgtaaaaaccgtttacgccccaaataatcgcaccaatcgctacagcaagtggaataactttgccaaaatgaaatggcgtattgccttgagaactgccattattttgaccgctctttttatttccaccacctaattttttaagcagattattaaaaatctcctcaatatctggcggagattgctcttgatttccacgattttgattgttattccatccattattattggatgaatttcccggctgttggtcgttgctttgccctggtgtactccaaggatcgcgatctgaaccgttctgtgacatttcattctccatttgtcaaaaaattgttaagagtttagctaaataaatggggcacgtctatgaaaatataaggctttttaggcaataaaaaatccttgattttatataaggatttttttgattaattcacttcataaagaacatatttttcaagttcttttatctgtaaactttctctattccattcataaaagtgcggtaatttttcttgatgattgacaaaagcggctaaataaatagggagttcatcagtaaaccacaactgcccctgcggacaataatctgaaaaaattttttgttgttcaggaaaatgacgaacattggataattttacgatcccaaatccttgagatttcaatacagcctctcgcaaacaccaacaacgataaaaagcgttcaaagaatcctgttgatgatgaaaccaatcaatttcttcttttggtgcaatatgttccatcaacgccgtaaaatttcttattttaggaaattcaatatcaattcccaccgcacttttttcttcttttctaatatctaatattaccgccacccaatcaccagaatggctaatattaaaatctattcgctcatcaagaaaataaggtctgccactttcagtacgatgaatttgagataaaagtgcggtggattttcctgctatttttagaagttggaaaagtaataaatgcgcaagccgacgacactgatgacgctgaaaaacacgggagctacccgtttcaatttgatatagattttctggaatcagttcatcgggtaaggattccaaagaaaaaggttgatttatattgccgtaggcgatgtaggttgtcataaaataaaagtaccactcaaaggtgcttttatattaaaaggatttagtttgtgtgtaaattagcgaatcactaattccgccacagaaacaccaactaagcaagcaacaacaaccccaattaaacctggcaccataaaactgtggttaaaataatatttaccaatttttgttgtacccgttacgtcaaagtttactgttgcaatatctgacggataatttggaatgaagaaatacgcataagttgcaggcattaaaccaactaagattggtgctggaatacctaagccaatacccacaggtaataacattacggctgttgctgcttggctattaattacaactgagactgcaaataacgccaatgcgaatgtccaagggtaagtttgcaccatatcagtaatcgcggctttaaattctggcattgcatatttgaagtaagtgtcgctcatccacgcaataccataaattgcaatcgctgctaccatacctgacttaaataccacaccattttgcacgatttgaggattcgttttcgttgcaagtaaaatcacaccgccaaagcaaagcatcatcatttgaatgataagtgacattgaaattgcttttccgctaccgatagtgcgaatttcaggaatcatcgcaatcgcaacaatcacaactaaagcaagtaaaaataggtaaacagatttttttgccccttgcggaagggtttcattcaatgttgtactggtagtatttaaaatacgttcgcgccatactggatcttgtaaacgacgttgatattcaggatcttgttctaactctttaccacgacgcatactgtataaagaaagcgcaatcgtacccgctaaagtagcaggaacggttacacaaataatatctaataaactaatatgctcaaaagcgggcattgctgtaattttacctagataaaatacaacagctgcagaaagtgggcttgatgtgatggctaattgcgatgctaccgaagacgccgccattggacgttctggacgaattttgtttttcaatgcaacatcgccgatgattggcataattgtgtaaacagagtgacccgtaccaagcataaaggttaataaatagacgactaatggacctagtaaagtgacacgttttggatttttacggagaatgcgttcagcaatttgtaacataaatttcaaaccgccagctgcttcaagtacggatgcgcaagtcaccactgcaagaatgataagcataacatcaatcggtgctttccccacaggcatacgaaatacgaaaacctcgatagcaagaccgataccagaaacaacacctaatccgataccgccgtaacggctaccgatatagagcattaatagtaaaaataaaaattctaagtaaagcataaacacctcaaaaatgaaaaactatgcaaataatacttctttttaggcatataactaaataattttttaaaatttaaaccaagattttaagtaaaagataatttagatcaatgtttatgaaagggaaaaataaaaagtgcggtaattttaaagaggattattagaaaaaaattaggcgacttaaaacgtcgcccaacttaaaattattgattgttttgcacgtaatcaatcgcagattgaacagtggtaattttttcagcttcttcatcaggaatttcaatatcaaattcttcttctaaagccattannnnncattccattcattaattaattaatgaatgaatgnnnnncacaatagttagtttgtcctggattacccgttgaaccaaccactgaaccaatattgatgatacgaccaaaacgttttttcatcattgaacgtaacatggctttagaaagatgatacaccgaagttaagttagtttgcataatatcaaaccattcctcatctttcatacgcatcaataaattatcgcgagtaatacctgcgttattcacgagaatatcaatatcgccaaaatcatttttaatttgttcaagtaaggtttcgatagattctttatccgttacgtttaaaactaaacctttacctttatcccctaaataagccgagatcgcctctgcacccttttcagaggttgcggtaccaattacaaacgcaccttttgaactaagttcttctgcaatcgcacgaccgataccacgggtagcccctgtcactaaagcaattttaccttgcatttttccttccttttacactaaaaattcttctaccgcattgaatgatgcgacatcatttacagatatagcttgtaaatcacccacaatgcgtttggttaaaccatttaatactttacctggccccacttcaacaagcactagaacgccatcttgcgccattttttcaactgtttcagtccaacgaactggactatataactgacgaacaagtgcggtacgaatttcggcaccttcagtttctgctttcacatcaacgttatttaatacagctgttgctggcgcattaagcgtaataccttcaagtgttacagctaattgatctgctgcaggtttcattaatgcgcagtgagaaggcacgctcaccgctaatggcaatgcgcgcttagcacccgcttctttacataatgcagccgcacgctcaactgcagctttcgcgccagcgataacgacttggcctggtgagttaaagttcacagcagatacgacttcgccttcctctgcttgtttgcaagcattaataattgcttcattatctaaaccaatgattgcatacattgcacctgtgccttcaggcacagcttgttgcattaattttccgcgcaattccactaatttaatcgcatcttggaaatccaacacgccagcacaaaccaaggcagaatactcacccaagctatggcctgccattacttctggttttaattgaggaaatttttcttgccatacgcgataaatagcgactgaagcagctaaaagtgcgggctgagtttgccaagttttattaagttcttcagctggaccttgttgaacaagataccataaatcataaccaagcgcatcagatgcttgtttaaatgtttcaataacgattggatattcagttgcaagatcagcaagcataccgacagtttgggagccttgacctgggaagaccattgcgaattttttcattatgttttgtcctattgtttttaattgaaaattcttcttcggtaattaaaatcgggtttcgccgatggcgacctacttttctttgcttgtgcaaagcaaagtaggcaaaagaaacactccccaattaaatcgctgatctttgctttgtttcaattttctttacggcaattttgctgaactcgcttcgctcaaacagacgcaaattgcctaaaaattgaaagtcacaaaggcgatttatatggggcccaaatttaatcggagcattatttaaaaagtgcagttgattttgagttcatttttagagtgaaaaacattttgaattttcaccgcactttacattgaagaaagaacaaataaggttcccttctttgccgcctgaaaaaatagaaatttgtaggaaatttgcgtctgtttgagcgaagcgagttcagcaaatttccgtgaagcaaatttctattttttcaggaaacaaggcaaagcagggttgcttttctttttgcttactttttctttggcaaaacaaagaaaaagtaagtcgccgtcaggcgaaatcctgacatttaacacaaaaagtgcggtcaatttttaccgcactttaaaatcatcaataattatatcaaatcaactaaaatctcactaacgctgaaccccaagtccaaccaccgccaaaggcttctaataatagtaactgcccacgttgaatacggccatctcgaacagcctcatctaaagcgacaggcactgttgctgcactgttattagcgtatttatctaacgttaccaccacttgcgacatatccatttctaattttttagctgtcgctgtaataatacgtaaatttgcttggtgtggcacaagccagtctaaatcttttttatctaaattattggctgaaagtgtttcctccactacatttgaaagttcacgaactgccaatttgaacgtttcgttaccttgcatctcgatatagccagatttttctataccacgttctggctgagctaaaacaagggcattatttttatttgctgaagcgtgtaaatgggtggagataattccttcttgttcactcgcttctaaaattacagcacccgcaccatcaccaaatagcacaacagtgctgcgatctgtttcatctaatttacgagaattgagatctgagcctatcactaaggcttttttcactttgcctgcacgaataaattgatcagctacgctcaaagcatagacaaagcctgtgcaagctgcggctaaatcaaaagaaatcgcatcatcaatatttaataaaccttgcacttggcaagccgcacttggataagcatgtgagtgacttgtagttgcaacaataatcagttcaatatcttgaggattaatttgagcagcttcgatcgcattttttgccgcttcaaatcccattgttgcaacagtttcatcttccgctgcgatacgacgttcacggataccagaacgagtgacaatccattcatctgatgtatcaaccattttttctaaatccgcatttgtgcgaatatggctcggcagatagctaccggtggataaaattctactattcatactcaataagataagcgattaaaaaggaaaaaatctatggactatcgccaagtaagagataagaccacaccggattattttccgatgttaaaggaatgcagatagtaatacggggaccaacgtccccgcccatcacatctaacgccaaggttagacggttcaagtgaacacctataagtaaaaaattacttattgatcactttacgaccacgatagtaaccgtctgcagttacgtggtggcgtaagtgagtttcaccgcttgctttatctactgatacagcagcagttgttaaagcatcgtgtgaacgacgcatatcacgacgtgaacgagattttttgttttgttgaacagccattggctatactcctaaatttaatttacttttgctttaaattagctaatacagcgaacgggttcggtttttttgccaattcttcaggcaattcgccaaaaacctgttcctgcgcggacacttcacagtgttcagatgaatgcattgggacaagcggcaaagctaaaattagctcatcttccaccgtgccaattaaatctatttcgccaaactcattgaactcgattggctcataaatttcgggcaagtcatcagcctgatcccaattagccactggactataagtaaactcacattccaatgtttgtttgtaaggttcgttacaacgctgacattcaagatcgacatcaatctgtactttacctttcatcaccactaatttttgtggatcaacataaaacgataatgttacctgtgcatcgctgagcacgtttaccactgattccgccaaacgctcaagctgatttgccgaataataaccaacataatcaagccgtctttgagcatcttttactggatcaacggttaggggtagttttaccttttgcatagggcgtgaatattacctgttgttgcgaagatagtcaaagggaaatcacattttttattggataactcaataaaggaaattatccgctaactaaaaaggttggaactataacaaaaattgctataatcacgcctctttttttaacaaggaaagataatgatgacttcaaattcttattggcaacgcttaaaagtggcatttcaatatgtcatgccacaaatttatttaactcaaattgctggctggtttgctaaacaaaaatggggcaaaataacacattttgtaattaaagcttttgcgaaaaaatacaacattgatatgagcattgcgcaaaaagaacaattttctgattacgcaagttttaatgaattttttattcgtccgttaaaagaaaacgcacgtccaattaatcaaaatccaaccgcactttgtttaccagcagacggtcgcattagtgagtgcggtcatattgacgataatcttttattgcaagctaaggggcattttttcagcctagaagacttattggcagaagataaagaattagtggaaacctttaaaaatggggaatttgccactacttatctttctcctcgtgattatcaccgagtacatatgccgtgcgatggcacgctacgtaagatgatttatgtgccaggcgatttattctctgtgaatccatttttagcccaacatgtaccaaatttatttgcgcgtaatgaacgtgtgatttgtgtatttgatactgaatttggcacaatggtacaaattttagtgggtgcaaccatcactgcaagtattggcacaacttgggcaggcgtaattaatccaccacgccacaacgaagtgaaaacttggacttatgaaggcgaaagtgcggtcaaattattgaaaggtcaagaaatgggttggttccaacttggttcgacagtgattaatttattccaagccaatcaagtgcgtttagctgatcatttaagcgtgaatgaacctgttcgcatgggcgaaatcttggcatataaaaaataaacaggatttatttccataaatgacagaaacaaatcctgaaagtagatatttctcacttctttaaaggcagtataaccttactgcctttttcttctttcatttgaacaattaacgcattgttacaaattcctctgaacctgttggatgaattgccaccgtattgtcaaaatcagcttttgttgcgcccattttgattgctactgcaaatccttgaatcatttcatctacaccgaaaccaataccatgtaaacccacaactttttcatctttacccacacaaactaatttcattttgcacggttggcgatgttgagttaccgcagtgtacatcgctgtgaaagaagatttatatactttaacattttctgcgccgtactgctcaatcgcttgcggttcagttaaacctacagtgccgataggcggatggctaaatacaacggttggaactaaactgtaatctaaatattcagtcggtttattattaaataaacgctctgaaaggcggcgacctgctgcaactgcaattggtgttaattcaataccgttttcgataatatcgcctaccgcataaatgcctttcacattagtattttgatatttatctactttgacataaccgtgttcatttgtttctacacctgcattttctaagccaattttatctgtcgttggaacacgacctgccgcccaaataacgcaatctacggtaacatcagattgaccatcacatcttacagtaagtgaaccatctgcattttttacaatttcagatggggtagaattggtatgtaattgaattccatcttgcgtaagcacttccactaatgtttctacgattaatggatcctgattacgcattggcgcatggcgacgcactaataaatgtgtttccacgcctaagctgtttaatacgccagaaagttcaacagcaatatagcctgcaccaataaccgcagcgcgttttggtaattctgttaatgcaaagaaaccatctgaatcaatgccgtattcttgtcctttaatatttggacgatatggacgaccaccagttgcgattaaaatatgatctgcggttatttgttcttttgtaccatcagcaagcgttacttcgacggtatgcgcatcgacaaattttccgaaaccattaattacatcaatattatttttcgctaatacattattataagatgtatggatacgactaatataggcttggcgactttcaatcagttttgaaaaatcaaattttttcacttcaacatcaaaaccataatctggcgcataattgttgattgcttctgcaatatgcgcgccataaaacatcacttttttaggtacgcaaccgacatttacacaagttccgccaagatgttttgcttcaatgattgcacatttttttccataacttgctgctcgatttagagacgcaataccgccactgccaccgccaatagcgatgtaatcataatgtttagtcatagtttgatccttttttgaactcaaaaattttccatattttgcctaatttttatgaagaatgctataaattgatttaattggttttatgaatattttttattcttttgaacagatgattagtttgaaatgattttatgtgaagcctagtatgtagaataaaatagcgtgatagaaaaagaggaagattgttcaatcttcctcactgtagatatatgattaattagaatattggttaatcgcagccgcaacttcttgatcttgataaatattgttcacaatatcattaaaagtttgagatagcactttatgaatttcatcattgcccgcattaaatacgccctcttgtgagtgcgtgacattaaatgatttattatacgaacctttcgcaccttgtacataaactgtcgcttgaattttggtattaagtttataacgaagattaccttgttctacttgcgtaccaaattcacgcacatccacagttacccacgcatttgaaccatttaattgcccaattctaaagcctttactaattaaattttgctgcatcacttgctgaaataattgtgtaacacttggggatgcatttaatttaatcagttccccgtgtttcgtataactcgcaatctcttgtattgcgcggctatcttttgttgtaacagatacaacggcagttcgattaacattcattgaagcacttggcgcaggcggtgtaaatgctaatatatttgattgtgcttggcagcctgcaagaaataatgtagccgctagaatacctactgatgataatgtttttattttgtttactaatgccataatttccccataaatcaattagaattgtgctattcttacaaacttccttattaatgtatagcgtttcattttagtttttgtggagaacttataatgtcaattcaacaaattattgagcaaaaaattcaaaaagaatttcaaccgcactttttagcaatagaaaatgaaagccatttacatcactctaatcgaggttctgaatcacattttaaatgcgttattgtcagcgcagcctttaaaaatattcgaaaagtacaacgtcatcagcgtatttatcaattattgaacgaagaattaaatcatagtattcacgcattagcattacatttattcactccagaagaatggaaagcacaaaatgaaactgtaccgcactcaacaaaatgtgcaggtattggtcgttaattttgttataaaaatgtaacatttttgatatatcgcaaaaagttctaacaaaaaatcctctgtttaagtagcgaaaaacagagattttcgctagaataaggcgtttaatttagtccaaattcgatttctcggtaaaattattaactgtgaaatcaatccatttgagttttttattttgtgacattaatgtttttttagcggtttgtcacactcaaacgtgagattgcttctagggtatttttactatattagcaattgtatttttaaccttgaaaagtagtgcaaatagtatgattacaattaagaaaggtttggatctcccaatcgcgggaaaaccagcacaagtaatccatagcggcaacgctgtgaatcaagttgcgattctaggtgaggagtatgtggggatgcgtccttcaatgaaggtgcgcgaaggcgatgttgtgaaaaaaggtcaagtactttttgaagacaaaaaaaatcctggtgtaatttttacagcccctgcaagcggtaccatcactgcaatcaatcgtggcgaaaaacgtgtattacaatctgttgttattaatgtagaaggtgatgaaaaaatcacttttgcaaaatatagcacagaacaattgaatacactttcttctgaacaagtaaaacaaaacttgatagaatctggcttatggacggcattacgtactcgtccatttagtaaagttccatccattgaaagtgaagcatcttctatttttgtaaatgcgatggataccaatccattagcagccgatccctctgtcgtattaaaagaatattcgcaagacttcactaacggtttaaccgtattaagtcgtctattcccttcaaaaccattacacttatgtaaagcgggcgattctaatattccaactgctgatcttgaaaatttacagattcatgattttactggtgttcatccagctggtcttgtagggacgcatattcactttattgatcctgtcggtattcaaaaaactgtatggcatatcaattatcaagatgtgatcgctgtaggtaaattatttacaacaggcgaactttattcagaacgagtaatttctcttgcaggtcctcaagtgaaagaacctcgtttagtacgtacaataatcggtgctaatctttctcaattaacccaaaatgaattaagtgcgggtaaaaatcgtgtaatttctggctcagttctttgtggtcaaatagcaaaagattcacatgattatttaggtcgctatgctttgcaagtatcagtaatcgctgaaggtaatgaaaaagaattttttggttggattatgccacaagccaataaatattctgtgactcgtaccgtattaggccacttcagtaaaaaattgtttaattttactacttcagaaaatggtggcgaacgtgcaatggtgccaatcggtagctatgagcgcgtaatgccattggacattttacctacattattattacgtgatttaatcgtgggcgataccgatggtgctcaagagttaggttgtctggaattagacgaagaagacttggcgttatgttctttcgtttgtccaggcaaatatgaatacggttcaatcttgcgtcaagtcttagataagattgagaaggaaggttaaaaatgggtttgaaaaatctttttgaaaaaatggaacccgcgtttttacccggtggtaaatacagcaagctttatccgatctttgaatcgatttataccttgctttatacaccaggtacggtaacgcacaaaaacactcacgttcgtgatgcgttagattcaaaacgtatgatgattacggttttccttgcgttgttccctgcgattttctatgggatgtacaatgtgggtaaccaagcgattccagcgttaaatcaattaggcaatttagatcaactaattgctaacgattggcattatgctcttgcaagttcattaggtttagatttaactgccaatgcaacttggggctctaaaatggctcttggagcaattttctttttaccaatttacttagtggtatttaccgtttgtactatttgggaattgttattctctgtggttcgtggtcacgaagtaaatgaaggaatgttcgtttcaaccattttatttgccttgatcgttccaccaacattgccactatggcaagccgcattaggtattacttttggtatcattgttgcaaaagaaatttttggtggcgtaggtcgtaactttatgaaccctgcacttgctggtcgtgcgttcttattcttcgcctatccagctcaaatttcaggcgatacggtttggactgccgcagatggtttctctggtgcaaccgcactttcacagtggtcacaaggtggtcaaggtgcattgcaacataccgtaacaggcgctccaattacttggatggatgcttttgttggtaacttacctggttcaatgggggaagtttctacccttgcaattttaattggcggtgctgttattgtattcactcgcattgcagcttggcgcattattgctggtgtgatgattggcatgattgcaacctcaaccttgtttaacctaattggctcagagactaaccctatgttctcaatgccttggcattggcactttgttttaggtggatttgcattgggtatggtatttatggcgaccgatcctgtttcagcatcttttactaatactggtaaatggtggtacggtgcattaattggcgtaatggctgtattaattcgtactgtaaacccagcctatccagaaggaatgatgttagcgattttatttgcaaacttatttgcaccgattttcgactacatcgttgttcaagcaaatatcaaacgtcggagagcaagaacaaatggctaagtttaataaagacagcgtaggcggcacaatccttgttgtgctactactgagtttagtttgttccattattgttgctggttccgcagtaatgttaaagcctgcacaagaagaacaaaaattgcttgataaacaaaaaaatattttaaatgtagctggtcttttacaagaaaacacgaatgtaaaagaaacttatgcaaaatttatcgagccccgtttcgttgatttagcaacgggtgaatacacacaacaagcagatgatagccaacaagcaattcctgctgatgcggataaagcacgtattcgttctcgtagcaaaacaactgaaatttatcttgtaaaagatgaacagggtcaaactcaacaagttattttaccaatttatggcactggcttgtggtcagtgatgtatggcttagtatctgttcaaccagatggtaatactattaatggaatcacttactatcaacacggagaaacaccgggattgggcggagaaattgaaaatccaaactgggcaagtctatttaaaggtaaaaaattatttgatgagcaacatcaacctgccattcgtattgtgaaaggtcaagctccacaagatgaacatagcattgatggtttatctggtgcaactttaacaggtaatggtgttcaaggtacctttaattattggttcagcaaagatggctttggtccatatcttgaaaaacttcattcaggagcaaactaatgtctggaaaaacaagttataaagatctgttgttagcgccaattgctaaaaacaaccctattgcattgcaaatcttagggatttgttctgcattagctgtaacaacaaaattagaaactgcttttgttatggcgattgcagttaccttagtaactggattatcaaacttatttgtttccctaatccgcaattatatccctaacagcattcgtattattgtacagctcgcaatcatcgcttcgcttgttatcgtagtggatcaaattctaaaagcctatgcttatggtttatctaaacaactttcagtattcgttggtttgattattactaactgtatcgtaatggggcgtgctgaagcatttgcgatgaaatcccctccagttgaaagttttgtagatggtatcggaaatggcttaggttatggttcaatgttaattatcgtagcatttttccgtgaacttatcggttcaggtaaattatttggtatgacgattttcgaaactattcaaaatggtggctggtatcaagcaaatggtttattcctacttgcaccaagtgcattctttatcatcggatttgtgatctggggattaagaacttggaaaccagaacaacaggagaagtaatcaatggaacattatattagcctatttgttaaggcagtcttcattgaaaatatggcactttctttcttcttaggaatgtgtactttcttagcggtatctaaaaaggtgtccactgcgtttggtcttgggattgcggtaactttcgttcttgggatcgcagtgccagtaaaccaattaatttatgcaaatgtactaaaagaaaatgctttaattgaaggtgtagatttatcattcttaaacttcatcactttcattggggttattgctggtttagtgcaaattcttgaaatggtattagataaatttatgccatctctttataacgcattagggattttcttacctttaatcgcagtaaactgtgcgatctttggtggggtatctttcatggttcaacgtgattacaatttccctgaatctatcgtgtatggtttcggctcaggtttaggttggatgttagcgattgtagcgcttgctggcttaacggaaaaaatgaaatacgctgatattcctgctggattaaaaggtttaggtattacctttatctcggttggtttaatggctctaggctttatgtctttctctggtattcaattataaggagtgtaatcaatgagcgattcagtaattcttgcactcggtattgccgcattcacggttattgtattagtgttagtggcaatcatcttatttgcgaaatcaaaattagtcgattctggtgatattactatcgacatcaatgacgatcctgaaaaagcgatcacattacctgcaggtggcaaattattaggggctttagcaagtaaaggtattttcgtgtcttctgcttgcggcggcggtggctcttgtggtcaatgtattgttaaagtgaaaaatggcggtggagaaattcttccaaccgaactttctcacattaacaaacgtgaagcaaaagagggatatcgcttagcttgtcaagttaatgtaaaaggtaatatggaagttgaacttccagaagaaatcttcggcgtgaaaaaatgggaatgtactgttatttctaacgataacaaagcaacctttatcaaagagcttaaattggctattcctgaaggcgaggaagtgcctttccgtgcaggtggttatatccaaatcgaagctgagccacatgtggtgaactataaagattttgatattccagaagaataccacgaagactgggataaatacgatttatggcgttatgtctctaaagtggacgagcatattatccgtgcttactcaatggcttcataccctgaagagaaaggtatcattatgcttaacgttcgtattgcgactccaccaccacgccaacctgatgcgcctccgggtcaaatgtcttcttatatttggtcattaaaagcaggagataaagtcacaatttctggtccatttggtgaattctttgcgaaagaaactgatgcagaaatggtatttatcggtggtggtgcgggtatggctccaatgcgttcacatatcttcgaccaattaaaacgtttacattctaaacgtaaaatgtcgttctggtatggtgcacgttctaaacgtgaaatattctatcaagaagactttgaccaattacaagctgaaaatccaaactttgtatggcacgtggcactttcagatgcattgcctgaagataattggactggctatacaggctttattcacaatgtactttatgaaaactacttgaaaaatcatgaagcaccagaagactgtgaatactatatgtgtgggcctccagtgatgaatgcagctgtaattaaaatgttgaaagatcttggtgttgaagatgaaaacattttattagatgactttggtggctgattttagttaatcaattcatcataaaagctgaccgcactttgtgataaagtgcggtcaaaatttaagatgtttttaaaaattttctatgattacaggtaagttttgttgagtttgccagtaattcacaaatttaggaaatccagatgaaaaaattaataagcggtatcatagcggtagcaatggcattaagtcttgctgcttgtcaaaaagaaacaaaagttatctctttaagcggtaaaacaatggggacaacttatcatgttaaataccttgatgatggttcaataacagcaacatctgaaaagacgcatgaagaaattgaagcaatcttaaaagatgtgaacgcgaaaatgtccacttacaaaaaagattcggaattgagccgcttcaatcaaaatacccaagtgaacacaccgattgagatttcagcagattttgccaaagtattagctgaagcgattcgtttaaataaagtgaccgaaggtgcgttggatgtaactgttggtccagttgtaaatttatggggatttggtcctgaaaaacgcccagaaaagcaacctacaccagaacaattagctgaacgccaagcgtgggttggcattgataaaattaccctagatactaacaaagaaaaagctacattaagtaaagcacttcctcaagtttacgtagatttatcgtcaattgctaaaggctttggcgttgatcaggtggctgaaaagttagaacaattaaatgctcagaattacatggttgaaatcggcggtgaaattcgtgcgaaaggaaaaaatattgaaggtaaaccttggcagattgccattgaaaaaccaactacaacaggcgaaagagcggttgaagctgtcattggattaaacaatatgggaatggcaagttctggcgattaccgtatttactttgaagaaaatggcaaacgctttgcgcacgaaattgatccgaaaacaggttatccaattcagcatcatttagcctcaattacggtacttgcaccaacctcaatgactgcagatggcttatctacagggttatttgtgctgggggaagacaaggcgttagaagtggctgagaaaaataatcttgccgtttatttaatcattagaacagataatggttttgttaccaaatcatcctctgctttcaaaaaattaacagaaacaaaagaatagttatgcaaactttattttttactttaatcgctttcgtcgcaattatattgttgatgtctatcggatttattatcaaaaaacaaagtttaaaaggcagctgcggtggtttatctacccttggtattgccaaagcttgcgattgtgataaaccttgcgacacgcttcaatcaaaattagatgcaggcgatgaacaagcgaaaactgaatatgagcaaaaatttgcgaaaaaagatgatgactcgcaattttatgaagtgaaataacttgctcaaaaatgaccgcactttatgtgcaaaataaaattaacggcaaaattattttgccgttttctaattcaatgaccaatgtgcttcgccttaaccgaagttacgggagaactatgttaatttcaaatacttataatcaacactttcctcaattgacgcaagagcagattgcgagcaatgcgacaaaaaaagtcatttgtggtatgtctggtggcgtggattcttctgtgtcagcttttattcttcaacagcaaggctatcaggtggaaggcctgtttatgaaaaactgggaagaagatgatgatacggattattgtactgccgcagctgatcttgcagatgctcaggctgtatgtgataagttggggatcaaactacataaaattaattttgctgcagaatattgggataatgtctttgagcattttttaactgaatataaagcagggcgcacgccgaacccagatattttgtgtaataaagaaattaaatttaaagcatttttagaatatgcagctgaagatctcggtgcagattatattgcaacagggcattatgtacgtagagcgggagataatgaaaatgcaaaactattacgtggtttagatcccaataaagatcaaagttattttctttatactttaagccataaacaagtggggcaaagtttattccccgttggtgaaatcgagaagcccattgttcgtgctattgctgaagatcttggcttaattacggcgaagaaaaaagattctacagggatttgttttattggtgagcgtaaatttaaggatttcttagcacgctatttaccagctcaaccaggtaatattcgcactgtagatgatgaaattattggtcgccatgatggattaatgtatcacacattgggacaacgcaaaggattaggcattggtggtctaaaaaatgcgggagatgaagcttggtatgtagtagataaagatgtagaaaataatgaacttattgtcgcgcaaggtcacgatcatcctcgtttattttcaaaaggattgattgccagccaattacattgggttgatcgcgaaccaattcgagagtcattacgttgcacggtgaaaacgcgttatcgccaacaagatattccttgtgtgattgaaccaattgatgatgaaaccattcgagttatttttgatgaacctcaatcagcagtaaccccagggcaatctgccgtattttaccttggcgaagtttgtttgggtggcggtattatcgcagaaagaatataaaacaaagatgactaaaagcgcgtaaaatgcgcttttaaactatttattcaaaccaaatgacgctcgccattcgtcccgtttgattgtccctgcgataagaaaagaacttttctttttcgttgaatgtacagtgatttccaccataaatttgcgtaatacctagattgtttaatcgctgagttgcaatttgataaagattactcaggtatttaccgtcttcgattgcatcaggttgaaaggcgagtttggctttttcatctactgcaacaaacttttctacaacatcaatcccaacttgaaaggcctttggacctattgcagggccaaaccacgcgataatatcttcaggtttagcttgaaaatatttcactgtttcttctagtacgccatcgcataaaccacgccagccagcatgtgctgcagccacttcattgccagatgttgtagtgaatagaactggcaaacagtctgccgtcataacaacgcaaacttgattgggaacatttgtataaactgcatccgcttcaagattttgttctgaataaggtaattgaagtactcgagtgctgtgtgtttgcgttaaaaatataggtttttgtggcaagccaaatttttcgactaataaagtgcggttagtttttaccgcacttttatcatcaccgacatgatcgcctaagttgaaactcaaataaggcgctaagctcacgcccccttcacgagtagtggtaaaggcatgaatgttctttggaacgttccaattggggttaattgcttgcatattaataatctaactcatcttgatgttcgagatagtcggctttgagggcattaagcaattcaacaaagtcatctggtaatggtgcataccattccatcatttcccctgtaattggatgagctaagcgtaacatgaccgcatgtaaagcttggcgtttgaaattacgcaatacttccataaagtcttcgctcgcatttttgggtggacgagggcgtccgccataggtttgatcgcctagcagtggatgggcaatatgtgccatatgaacgcggatttgatgggtgcgccccgtttctaaacgtaaacgtaaacgggtgtaattacggtaattttccataatacgataatgggtaacagcgggttttcccattggatgaaccgccattaaagtacgtttggttgcatgacgagccataggttgatctactgtgccacctttagtcataatgcctgaagcgactgcttcatattcgcgcgtaattttacgtttttgtagatcacgtactaacttagtttgagcaggaatggttttagcaacaaccattagaccagtcgtatctttatctaatcgatgcacaattcctgctctcggtacttctacaatcggcggataatgatagagtaacgcattgagcacggttccatttggattgccagcaccagggtgtaccacaagatcttttgatttgttaatcacaataatatcatcatcttcatacacgatattcaatggaatattttctgcttcaaaacgtgtttcatcttccacttcaacaataatctctattctctctcctccaagcactttctcacgcggaatattagtaatgcggtcgttaagttttacgagatcggcttcaatccatgtttttaatcgggaacgagaatattcagggaacaactctgcaagtgtttggtctaaacgttgtcccatttgttctggctgcacttcagccgaaagggtaatttgtggcataaatagctctcaaaaattttaaaagttggcttattgattaatgttctatacaatagcggacaattgtatcttatttattggttttcgtaaaaattaaggaaaaaacaatgcgtaaaataaaatctttggcattgcttgccgtggcagcattggttattggatgttcaagtggttcaaaagatgttgaacaagcatcggtaaatgaattatacacaaaaggtacaacatcattacaagaaggtagttactctgaagccattcgctatttaaaagcgacgactgagcgttttccaggtagcgtttatcaagaacaagcaatgttagatttaatttatgcaaattataaaactcaagattatacgcaagtattattgatggtagatagctttttacatcaatttccacaaagcccaaatcaagcctatgcggtatatatggctggcttaactaatgcagcaacaggcgataatttcattcaagatttttttggaattgaccgtgctacacgtgaaacaacctctatgcgtaccgctttttctaatttccaaaacttagttcgtgtatttcctaatagcccttactcacaagatgctttagctcgtatggcttatattaaagatgcactggctcgtcatgaattagagattgcaaaattctatgcaaaacgtaaagcgtgggtagcagttgcaaatcgtgtggtaggaatgttaaaacaatatcctgatactaaagcaacttatgaaggattatttctgatgcaggaagcttatgaaaaaatgggtttaaccgcattagcaaatgatactcaaaaaattattgatgcgaataaagataaaacttttgcaccaattgaaaaaccaaacgagccagacttaaaagtgccagcagtaaaatagcaataactgcagaaaaatcgaatactctctgcaccctaaaagttgaataaaatttaaactaattaaggtgcagatttttttattttttatcaactgaaaatgctttaccataatttgcacaaataatctgagcagcattataaagcgttgtatcaggtgttaaacttaacgtatgtttcttttgctttttaggtgctgcccgcaaaccctgtccccaaaattcatcatagaaatcagttcgtatttgagttaaatgataatttgcacaattcaaaatcttatactgacgaacagaacgtgcataacgtttaggctcaggataaacatacaatcccttatctaaattcaccactgcatcaaaatgtacaatttgtggctcttggttatccacccagatcgattcactatcgatgtaataattcacattctttaccaaacgtatatatccgcttcgtacatcagtcggcggtgccagcttcacatcattttgttcagccttttggatttgagcagaacaagcggtaagtaacccaagtgataatgttaaaataatttttttcattatttactccttatgttagctgacatttattctagaattttacaatgtgtccataaccttctagaattgttttaatatgctctaaggattctttagttggcggtaatacattttcaagctcataatctaacccaagggttttccatttatgtgcacctaatcgatgataaggaagaagttcaactttttcaatattggtcataccttcaataaactgacctaataaatgcacatcgtgatcgctatcagtataaccaggaaccacaacataacgaatccaagtatgttgattacgtttttgcaaatattttgcaaattcaagggtacgtttatttggcaccccaataagattttgatgaacttgatcattaagttcttttaaatcgagtaaaacaagatcggttacatctaataattcatcaataatatgatcataatgacgtacaaaaccatttgtatctaagcaagtattaatcccttcctctttacaagcacggaaccaatcacgcacaaactctgcttgtaacacagcctcaccgccagatgccgtaacaccaccgccagtagcattcataaaatggcgataagtcacgacttctttcattaaatcttcgacactgatttctttaccaccttcaagatcccaagtatcacgattgtggcaatatttgcagcgcatcaagcagccttgcataaataaaataaaacgaatacccggcccatctacagtgccacaggattcaaaagagtgaattcgtccaagaactgacatacataaatttcctaaaattagatatagctaaattttaccaaatatttagtctataaaaaatgagcctgatttaaatcaggctcatacatattatattcccgccaaagtgcggtcaaaaataaaaatgtttttacattgactctgtgaaagttctagtaattacgtcttgttgttgctctttagttaaagagttaaaacgtactgcgtaacctgatacacggatagtcaattgtggatatttatccggattttccattgcatctaacaacatttcgcggtttaacacgtttacatttaagtgttgcccaccttcaaccgttgcttcgtggtggaagtaaccatccattaagccagcaaggttgcgacgttgtgcttctgcatctttacctaaggcatttggtacgattgagaaggtataagaaataccatctttcgcgtaagcaaatggaagtttagctacagaagttaatgatgctaccgcacctttttggtcacgaccgtgcattgggttcgcacctggtccgaatggtgcaccagcacgacgaccatcaggggtgttacccgttttcttaccataaactacattagaagtaatggttaatacagattgtgtaggcactgcattgcggtaagttttaagtttttgaattttcttcataaaacgttcaactaagtcacaagcgatgtcatcaacacggttatcattgttaccatattgtggatattcaccttcgatttcaaagtcgattgctacgttagttgcaacaacattgccatctttatctttgatgtcgccacgaactggtttaactttcgcatatttgattgctgaaagtgagtcagccgcaacagaaagacctgcgataccacaagccatagtacggtatacatcacgatcatgtaatgccattaatgcggcttcgtatgaatatttatcgtgcatatagtggattacgtttaaggcagtcacatattgttttgccaaccaatccatgaaactatccatacgagtcattactgtatcaaaatctaatacttcatcagtaattggtgcagttttcggacctacttgcatacctaatttttcatcgataccgccgttgattgcgtataacaatgttttcgctaagtttgcacgtgcaccgaagaattgcatttgtttacccacaatcattggtgatacacaacatgcgattgcgtagtcatcgttgttgaagtctggacgcattaaatcatcgttttcgtattgaactgatgaggtatcaatcgatacttttgcacagaaacgtttgaagttttcaggtaattgttcagaccaaagaatggttaagtttggttctggagaagtacccatgttgtaaagagtgtgtaaaatacggaatgtatttttggttactaatgtacgaccatctaaacccataccagcgatggtttcagttgcccacattgggtcaccagagaataattgatcgtattcaggtgtacgtaagaaacgaaccatacgaagtttcataactaagtggtcaactaattcttgcgcttcagtttcagtaattttccctgcttttaaatcacgctcaatgtacacgtcaataaaggttgcggtacgaccgaatgacattgctgcaccattttgtgattttattgcagcaagataagcaaagtacatccattgaatggcttcttgagcattagttgctgggttagaaatatcataaccatagcttgctgccatttgttttaattgacctaatgcacagtgttgttctgcgatttcttcacgtaaacgaattgttgcttcaagatttacgccatcttctaaatctttttgtaaagaagagaattgtgcgtatttatctttcattaagaaatctacaccataaagtgctacacgacggtagtcaccgatgatacgaccacgaccataagcatctggaagaccagttaataccccagatttacggcaacgtaaaatatctggcgtgtaaacatcgaatacaccttggttatgtgttttacggtattcagtgaagatttttttcacttttggatcaagttcacgaccataaactttacaagaaccttccaccattttgataccaccgaatggcataatggcacgttttaaaggttcatcagtttgaagaccaacgattttttctaaatctttgttaatgtaaccaggtgcgtgagagataatggtagatggtgtatgttcatcaaaatctaatggcgcgtgagtacggttttcaattttaattccttccattacagattcccaaagcttggttgttgcttcggttggacctgctaagaaagagtcatcgccttcataaggggtatagtttttttggataaagtcacgtacattgacattttcttgccaatcgccaccagcaaaaccagcccacgccaatttttgcatttcattaagttctgacatagtcatttcctttgttaattaataaataaatctttaatgcgttttggttaaataacgttggaatacaccaatacaaattgccccgccgacaatatttcccaacgttacagggattaaattcttcacgatgaaatggtacaaatctaaatctgcgtatttcattggatcaacaccgatttgttgccaaaattcaggtgtactaaaatgtgcggtaataattcccatcggaatcataaacatattagccacacagtgttcaaatcctgatgcaacaaacaaaccaatcggcataatcataataaatgctttgtctgtaacagtcttaccagaataagacatccaaaccgccacacacaccataatgttacataaaatacctaggttaaaagcttcaaaccaagtgtgatgaattttatgttgggcggttgcaagaattgttaaaccccattgaccatttgctgccattgtttgtccactaaaccaaataacagccgcaataaataaaccaccaacgaagttgcctaaatacaccacgatccaatttcgaatcatttgtgtcgtggtgattctaccgcctacacgggcgactaaagttaaagtagaagaagtgaataattcagagcccagaattaccaccataattacacctaatgagaatactaacccacccactaacttggttaatccccaaggtgcgcctgcactagcagtttgtgttgttgtgtaaaatacaaaggctaaggcaatacaagcaccggcactaataccggacataaacgataaaaatggacgtttatttgctttataagttgctgtattttctgcataatccgttgcttcaacaggtgtgagcgcaacagaagatagtttttgattttctgatgccataatcaaactccaactattgacattgaaaaagttgatgaaaatttaatacttttaacaagtttacgactacaaatacttctataattggtgctattttactctcctcccctttcattgcaaagaaaagcaaaaattatttcaacaaactttgatattttgcaaggtttgtttaattaaagacaaaattcccatattaatattcgctcaatttcatacattcagagtaagtaaagcacttaatttgaaacttgttttattcgcgtaataccgtgaattcccccagataatcatccactttcccaaaaccttgattattcacaacaggcaaattcataatttttttaaacgaaccagattaagtgtatagacttgctattttgagtaattaatagcattattttgatctttttgaagaaaaaggcgatctttgtcataaaataatgatttaagtgcggttaaaatttggttaattttaagtgcacttctttatacaggagcagattatgtattatggtttagatattggtggcacgaaaatagagcttgccgtattcaatgaaaaattagaaaaattatattctgaacgggtaccaacacctaaaaccgactatgaagaatggcttaacacgattgtggatttagtgaatcgtgctgatgaaaagtttggtgaggtgggcaccgtaggtttgggcgtacctggttttgttaatcaacaaactggattagccgaaattgccaatattcgtgtggcagataataaaccaattttatgcgatttgtccgcgcgtttgggccgtgaagtgcgggcagaaaatgacgcaaattgttttgcgttatctgaagcatgggatacggaaaatcagcaatattcgactgtacttggtttaattcttgggactggttttggtggtggctttgtcttaaacggtaaagttcattcaggtcaagtgggaatggcgggagagcttggtcatttacaattaaattatcatgctttgaaattattgggatgggataacgccccaatttatcaatgcggttgcggcaacaaggcttgtttggataattatctgtctggtcgcggttttgaaatgctttatcaagatttgaaaggcgaaacattatctgctcgtaaaattattgatttgttctatcaaagcaatgaaagtgcggtagattttgtgaatctttttgttgaattggcggcgatttctattggcaatatcattacggcatttgatcctcatatgattgtgttaggtggtggattatctaattttgattacctttatgaggctttaccaaaagcgcttccgcctcatttgatgcgaaaagcaaaagttccgccaattaaaaaagcgaaacacggcgattctggtggtgtgcgtggtgcggcagcgttgtttttaaccaaataattcaacaaactagtggggcgtattcaaataatacgccctttattttggaaaatatttagaatattgtgaatttattagattttttcttgtttgtgtttcttttctctagagaaattattaaaaaatctcgccttttcattgaaaagccatacaatcaaattatttatcgcttgagggatgattatggaatttgaattttcaaaaatgttagaagaagtgctaacttggatagtcgcacaccttgatggacctttatgggatgccaccattattattttgcttgggactggtctattttttaccattacaacaggatttgtgcagttccgtttattccctgcaagccttcgtgaaatgtggtttggtcgtgcggtggagggtagttcattaacacctttccaagcgtttacgacaggtcttgcgagccgcgttggtgtgggtaacattggtggggttgcaacggcaatcgccttgggaggcgaaggcgcagtgttttggatgtgggtaacggcatttattggtatgtcgagtgctttcgctgaatctacccttgctcaattatttaaaattcaagataaagatggatcattccgtggtggccctgcttattatattgtgcaaggtttaaaatcacgttgtatggcagtggcttttgcacttgcattaatttttacatttggttttgcctttaattctgtgcaggcaaactctattgttgaagcaaccagcaatgcgtggaattggaaaggggaatatgtcggtatttcattagtaatttttaccgcacttattattttcggtggcgttaagcgtattgcgattatttcgagcaaccttgtaccaatgatggcacttttctatttgattatggcggtaattattcttggcatgcatattgatatgatcccttccgtgattcatcgtattgttcaaagtgcatttagttttgatgctgccgctggcggaatgtttggtgcattggtatcgaaagcaatgatgatggggattaaacgtggtttattctcaaacgaagcggggatgggatctgcgcctaattcggctgcagcagctcacgttaagcatccagttagccaaggtttagtgcaaatgctcggtgtgtttgttgatacaatgatcgtttgtacttgtactgcggtaattattctactttccaataattatggtagcgaaacgctcaaaagtatctcacttacgcaaaatgctttgcaataccacataggtgaatttggggtgcatttcttggcgtttatcttattgttattcgcttattcttctattattggtaactatgcttatgcggaaagcaatatccgttttataaaaaataaaccttggtttgtatttttgttccgtttaatggtgctatttttcgtgtatttcggtgcggttcgctctggcaatgtggtgtggaattttgcagatacggtaatggctgtcatggcaatcattaacttgatcgcaattttgatgttgtcgccaatcgtatggaaattaatgaaagattatcaacgccagcttaaagaaggaaaaacgccagagtttaaaattgatgaataccctgaattacgtaagaaaatatttgattcccgcatttggaaataaagataaaatggctagaaagagattatctacctttccaaagagttagattattatttaaagaaattttttgatattgtttaaggcttggttcttctagttcagactgaataaactattgccggcactttttaccgccctcgtgccggctatcccaaactgctttgaaaactgaccgctctttagcttacttcaaaaatgccgcatgataggcaatatgctcgccaataaaactggcgatgaagtaatagctgtgatcatagcctttatggaagcacacatcgactggctgacttgccactcgacaggtttcgataaaatcttcggtacgcaattgtgtcggtaaaaactcatcttccaagccctgatcaatgcgtataccttgcactttatagccttgttgaatgagcaagctggcatcatattgctgccatttttcacgatcttcccctaaataggcagaaaaggctttttctccccaaggcacaaggcttggcgacaaaatgggcgaaaaggcagaaacactttgataacgttcccgatttcgcagtgccaataccaatgcaccgtgtccgcccattgaatgtcccataatggaacgtttgccgttggtagggaaatttgcttcaatcaaatcaggcaattcattcaagatataatcatacatttgataattcgtcgcccaaggctgctcggtcgcattaagataaaagcccgctccctgccctaaatcgtaaaccgcatcattcggcacttgctctccgcgagggcttgtatcgggggcaaccacaatcacttgatgttctgccgcgtaacgctggaagcctgatttggtaatgaaattttgttctgtacaagttaagccagaaagccaataaatcacgccaagcggtcgattctccggattatttggcaaatagacggcaaatttcatttcacattgaagtgtttgggcattatgcacccaaacttgctgtgaaccgccaaaaatttgatgttgttcaattagtttcatagcgtaccttagtagtgaataacagtacggattgatttaccttcgtgcattaattcaaaggcttcattaatttgatcaagtggcattgtgtgagtcacaaacagttctaactggatgtcgcctttcattgaatcttccaccatttgcggaagttcagagcgacctttcacgccaccaaatgccgaacctttccaaacacggcctgttaccaattggaacggacgcgttgaaatttcttgtcctgcacccgctacgccgatgataatggattgtccccagccacggtgagcactttctaatgcttgacgcattacgtttacattaccgatacattcaaaggtatggtcaatgccccatttattaatatctaacaacacatctttgatcggcttatcgtaatcattagggtttaaacaatccgttgcaccaaactgttttgccaactcaaattttgcaggattggtatcaatggcgataatgcgacctgctttggcttgacgcgcaccttgcactaccgctaaaccaatcgcacccaagccaaacacggcaacagagtcgccttcttgcacttttgccgtattatgcaccgcaccaatacctgtggtgacaccgcagccgagcaaacacacttgttcgtggttcgcttctgggttgattttcgccagtgaaacttctgcaacaactgagtattcactgaaggttgaacagcccatatagtgatagatcggctgaccttgataagaaaaacgtgtcgtgcaatcaggcattaagcctttaccttgagtgtcacgcactgagacgcataagttggttttacccgagcgacaaaactcacattcgccacattcagcagtataaagaggaatgacgtgatcgcccggttttacgcttaacacaccttcgccaaccgcaacaaccacacccgcaccttcgtgtcctagcaccacagggaataccccttcaggatcgcttcctgataacgtaaacgcatcagtatggcaaacgcccgtgtgagtgttacgaattaacacttcgcctttgcgaggcatttctacgtcgatttctacaatttgtaagggttgatttggggcgaatgctaccgccgcacgagatttgatggttgaattgatttgtttaatttccattgtttttcctcttaattcattgacaaagttgccttacgtaagcaagatagcaacagtttacactttagagttcactctaaagcaagtgtttttttaccatttttgtttaaagggaataaaaagtgacttacaccaccgctaaagctgctgaaaaaataggcatttccgcctacaccttacgcttttatgacaaagaaggcttgttacctaatgtcggacgtgatgaatacggtaatcgccgttttaccgacaaggatttgcaatggttaagtttattacaatgcttgaaaaatacaggaatgagcttaaaagacatcaaacgctttgcggaatgtaccatcattggcgatgataccattgaagaacgcctttccttatttgaaaatcaaacagaaaatgtaaagtgtcaaattgccgaattaaaacgttatttagatttgcttgaatacaaattagcgttttaccaaaaagcgaaagcactaggctcggtaaaagccgtaaatttaccgcaaattcctgaaacgagctaaaaggataaaagtgctcacatcacagaattagaagaaaaatacaatttttagagatagataaattttaacttttttattacataaataagttaaaaatcaggttttgtgatcaagatcaggataacataaaaataatctccgatagctattgttctaaatggctaaaaagagtatattccgagccaaattttttcttttttacagaacggagtttattatgtttggtttatcccccgctcaactgattattttattagtcgttattttattgatttttggcacgaaaaaattaagaaatgctggctcagatcttggtgcagcagtgaaaggtttcaaaaaggcgatgaaagaagatgaaaaagtaaaagatgcggaatttaagtctatagataatgaaacagcgtctgcaaaaaaagaaaatataaaagagaaagaacaggcttaatccgtgtttgatattggtttttcagaacttattttactaatggttttgggattggttgtattaggcccgaaacgtttgcctatagcaattcgcactgtaatggattgggtaaaaacaattcgtggtttagctgctaacgttcaaaatgagttgaaacaagagctaaaattgcaagaattacaagatagtattaaaaaagcggaatcccttaacttgcaagccctttcaccagaattgagtaaaacggtggaagaattaaaagctcaagcagataagatgaaagcagagctagaagataaagcagctcaagctggtacaacggtggaagagcaaatcaaagaaatcaaaagtgcggctgaaaatgcagaaaagtctcaaaatgcaatctcagttgaggaggctgcagaagcagaaaaaacacctaccgatttgaccgcacttgaaactcacgagaaagtagaactgaacacacatttatctagctattatcctcctgatgatattgaaatcgctccagcgtcaaaatctcaatcttcaaaaactaaatcatagcgagtttttatgagtaatgtggatgaatctcaacctttaattacgcaccttgttgaactaagaaaccgtttattacgctgtgtgatttgtgtagtgttggtttttgttgctttggtgtatttttccaatgatatttatcattttgttgctgcacctttaacggctgttatgccaaaaggcgcaacaatgattgcaaccaatattcaaacgcctttctttacgccaattaaattaactgcgattgttgcaatttttatttctgtcccttatttgctttatcaaatttgggcttttattgcacctgctttatatcagcacgaaaaacggatgatttatccgttgttattttccagtacgattttattttattgcggtgttgcttttgcttactatgtcgtctttcctcttgtattcaccttctttacacaaacagccccagaaggcgttaccatcgcaacagatattagtagttatttagattttgctttagcgttatttttagcttttggcgtttgttttgaagtgccaattgcgattattctactttgctggactggtattaccactgtaaaggctctttccgaaaaacgcccttatattattgttgcggcattttttattggaatgcttttaacgcctcctgatgttttttcacaaactttgcttgccataccgatgtgcttgctgtttgagctcggtctattggtcgctcgattttatcaaccaaaagacgacgaaagtgcggttaaaaataatgatgaatcagaaaaaacacaatgatgaactgaattgttagtcgtatgggggctttgcccccgtttttattatattgatataaccctaattttgttttttcataaaacatattttcgtagtgatttactagaaatatgatttgtaatctgctctatatttttattgaaaatatcattacctgatggttttctgtcgttttttattttttatctaataaatacgatattttttagataatttctttactttttccttttctttaaatttcctttataaaaatggttgcaagattaaattagccattgcatattgtctatgcgcttcacgaggcgtatacaataaaaatacaatatacacaacatcaacaaagagggaaattcattatgtcaaaagttgcttccttagatgcatttttaacaaaagttgctcaacgcgatggttatcaacctgaatttttacaagcggttcgcgaggtattcacatcaatttggccttttttagaagccaatcctaaatatcgttcagaagcattattagaacgtttagttgagcctgaacgagcatttcaattccgtgtggcgtggactgacgataaagggcaagtgcaagtaaacagagcatttcgtgtacaatttaatagtgccataggcccatttaaaggggggatgcgtttccatccatcagtaaatttatctatcttaaaattcttaggttttgagcaaatctttaaaaatgctttaacaacattgcctatgggcggggcaaaaggcggttcagattttgatcctaaaggcaaatctgatgctgaagttatgcgtttttgccaagcattaatggctgaactttatcgtcacgtaggagctgatacagatgttcccgcaggcgatataggtgttggtgggcgcgaagttggctatttagctggctatatgaaaaaattatcaaaccaatcagcctgtgttttcactggtcgcggtctttctttcggtggtagtttaattcgtccggaagcaacgggatatggattagtttattttgctcaagcaatgcttgctgaaaaaggcgatagttttgcaggtaaagtagtttcagtttctggttctggtaatgtagcacaatacgctattgaaaaagcattatctcttggtgcaaaagtagtaacttgttctgattcatcaggttatgtttatgatccaaatggatttactactgaaaaattagccgcacttttcgatattaaaaatacaaaacgtgggcgtgtgaaagattatgcagaacagtttggtttgcaatattttgaaggtaaacgcccttgggaagtgcaagttgatattgcgcttccttgtgcaactcaaaatgaattagaactttctgatgcacaacgtttaattaaaaatggtgtgaaattagtggctgaaggtgcgaatatgccaacaacaattgaagcaacagaagcattactagctgcagatgtattatttggtccgggtaaagctgccaacgctggtggtgttgctacttctggtttagaaatggcacaaagttcacaacgtttatattggacagcggaagaagtggacgctcaattacatcgcattatgttagatattcacgcaaactgtaaaaaatacggcacaattgaaggtcaagaaaacattaactatgttgttggggcaaatgtagcaggctttgttaaggtggctgatgcaatgttagcccaaggcgtttattaacaaataaaaaagttaaactaaataaccgcactgtaataaagtgcggttattttttaggatgaaatttgaatataagacaggcgacattttgtcgccttagatattatttattttgaattgttttcgtcacaatgattaatatcactgcatttaccgtaaagatacacgttatgcgtttttaattttatgccgtatttttcactgatttcacgctgacgttgttcaataatattatccgtaaattcaaatactttaccgcaatcttcacaaataatatgatcgtgatgttctgttggagcaagctcaaaaacggatttatttccctcaaaattatgacggattacaatgtgtgcttcatcaaattgattaagcacacgataaactgtggctaatccaatttcactaccttgttccagcaaaattttataaacatcttctgcagaaaaatgttcatttttatgattttgcattaaagcgagaatagttaagcgaggctctgtaatttttaatcccacttttttgagtaatttaatattttcttcagacataatttttcttcctattatgcacaaaatactaagccaattcagctaagcacatttcatcataaatttgtttacaccatttttctacacgctctgcggtaagctctggttggcgatcttcatcaatacataatccgatgaaagtgccatcttccaataaggctttcgaagcttcaaaattatagccttctgttggccaatttcctaccacaattgcaccgtgtggctctataatatcgcgcacagttccgatagcatcacagaaataatctgcataatcttcttgatcgccacaaccgaaaatacctacaagtttatctgtaaaatcaatttcttcgagtgttgggaaaaagtcatcccagtctgcttgtgcttcgccgtaataccaagttgggataccgaaaagcaagaaatcgtatgcttcaatatcttctttgctacttttggcaatatcacgaatatcaattaaatcactacctaattgtttttggatttgttttgcgatgttttcagtatttccagtatcactaccataaaaaagaccaactattgccatttttatttccttttttatattaaatttaatctattgattataaggcttatccaaatttggcgaactatatcataaaagcattctcacttaaactacttaattcttatttagaaatcgtttaattgcacgaataacaaaatcaggtttttcggcgtgaacccagtgtccactgccattaatcgtaaaggcagttgcattaggaaattgttctagaattttttcgctattttctatttttatataagaggaatttccacccttaataaaaagagttggcgtaaatacacgtactttttcccaatccataatattggcataattgttaaaaagtgcggtaagattaaaacgaaaacaatcagctgaattaacatcaaaagatttcaacataaattgtacaacgtcttcatcattaatttcttgttttaaaatcggtttggcttgctgacgattttcaggctttgcattttttaccgcaaataggccattaaaaacatctttatgaccaaatccctcataaggcatgggggacatatcaattacgattaatttttcgactaattctgggcaaagtgcggtgattttcatggcggtttttccccccatagaatgaccaattaatatcactttggataaatttaagtggcggattactgcgataacatcttcagccattagttgataattcattttttccgaatgaaaactatggccgtgattgcgtaaatcaatacgtaaaatactgtaatgttcactaaaagctctcgcaataacgccgagattatccatatctccgaataaaccgtgaataaaaattaaaacaggtgtattaatcgtttgttttacttgatgaaattgataattgagtaatgattttgccataatttttacgtgagaatttgtaaagaagtcgttataattgaaaaaaattttagcaaacagagagataaaaatgaagatcattgaagtagatgaagaattataccaatatattgcgagccaaacccgctctattggagaaagtgcttcggatattttacgccgtttgcttagtttacctgtgcatacttcaattgttaatgatttaattattacttcagcagaaacagatcaaaagccaaaacaggctatcaatgtgaaagaagtaaatatcaaaacaacaaaaaagcaatcaataaccgcaattaatcagattgtagaaaaagtccaaactttattaaattcaactgaatttcaagaagaaagtaaggctgttgtacgtttcttagcgattttacgtgtgctttatcgtacaaatcctgaaagttttgcacaagcaacggaatctttacaaggacgtactcgagtttactttgcacgcgatgaagcgacattattaatggcgggtaaccatactaaaccaaaacaaattccagatacgccttattgggttattaccaatacaaatagtggacgaaaaatgttaatgctagaaggtgcaatgcaatctatggaattacctgaaacattgattgatgaagtgcgatcatatttcacggtaaattaataatgtatccttggcaagattttgctattcaacctgatttctcagataaaatcgctttgcatactacgcagggcgatgtgcttacttggatagaattgactacaaagattaaccaaacagtggcttttttacaaaaaaaaggcgtaaatgcggaaagtgcggttgcttttgtgggaaaaaattcagagaaaattttatttttatatctggcgacaattcagcttggtgcaaaagttttaggcataaaccctgcctttccacaagaaaaaattgcaaaattatgtgagttttatcaaatcgatttttgtttttatgataaagatttactgaatttgcaagaaattggtgtttttacacaaaaagccgatttttttcgtcctgcgacgatgacgctcacgtctggctcgacaggtttaccaaaagcagttgtgcataatgtccaagcgcatttggataatgcaaaaggggtatgtaacttaatgaagtttgattgtaatcaatcttggttactttcattacccttatatcacgtttcagggcaaggtattgtttggcgttggttatattgcggtgcacaattacatttcccagaagatgatttttatgcttcattattaaagacgactcacgtttctcttgtgccaacgcaattacagcgtttattagattatttacaggaaaatccgagcatttcatttgctacacgccatattttactgggcggtgcgcatattccgacagaacttacacaaaaaatggtgaaatatggcattaaaacttattctggttatggaatgacggaaatggcgtctacggtttttgccaaacaatctgataaaaaacaaggcgtagggcaaccgctcttaggtagagagtattgtttagtaaatgatgaaatttggctgaaaggtgcaggtttggcgatgggttattggaaagatcgacaaattgttccattaacgaataaccaaggctggattcagacaaaagataaaggcatttggcaagagggcgaacttgttattatcggacgacttgatgatatgtttatttcaggtggcgaaaatattcagccagaagaaattgaacaagtgattattcaacattcttcagttaatcaagtgtttgttttaccacaaaaaaacaaagaatttggtcagcgtcctgtcgctttagtggattttaatgagccctttagcaaaagtgcggttgaaaatttaatgttttttttacaagataaacttgcacgttttaaacaacctattgcatattatcctttgccactgatgcttgagaaaggcattaagatctcacgtaaacagcttgctgattggctggcaaagcgagatgagataaattaatttaccatttagattagggaaaaataatgattaggaaacttatgaaaatacctccattttttaccgcactttttgcctcggcaatgtttacccttagcgtttcgcaaggggtattggcggcaaattcaacaaacgtattaccaacggagcaatcgcttaaagccgatttggctaacgctcaaaaaatgagtgagggggaggcaaaaaataggttgttagcagaattacaaacatcaattgatttattgcagcaaattcaagctcaacaaaaaatcaatgatgcattgcaaacaacattaagccattcagagagtgaaattagaaagaataatgcagaaattcaagcattaaaaaaacaacaagaaacggcaacaagtactgatgataatgcacaatcacaggactatttacaaaatagtctcactaagttaaatgatcaattacaagatacgcaaaacgcattaagcacagcaaatgcacaattggcagggcaaagttctatttctgaacgagcacaagcggcattaacagaaaatgttgtacgcacacagcaaatcaatcaacaattagccaataatgatattggtagcatattgcgaaaacaatatcagattgaattacaactgattgatttaaagaatagttataatcaaaacttattaaaaaataatgatcagctttctttactctatcaaagccgttatgacctattgaatttacgtttacaagtacagcagcaaaatattattgcgattcaagaagtcattaatcaaaaaaatcttcagcaatcacaaaatcaagtagaacaagctcagcaacagcaaaaaactgtgcaaaatgattacattcaaaaagaacttgatcgcaatgcacagcttggtcagtatttattaaaacaaacagaaaaagcgaattcattaactcaagatgagttaagaatgcggaatattttagatagcctcactcaaactcaacgtactattgatgaacaaattagtgcattacaaggcacgttagttctttcacgtattatccagcaacaaaaacaaaaattaccgactaacttaaatattcaaggtttatcaaaacaaattgccgatttgcgtgtacatatttttgacattactcaaaaacgcaatgaactttatgatctagataactatattaataaagttgaaagtgaagatggaaaacaatttactgaggcagaaagaacgcaagttaaaacgctattaactgagcgtcggaaaatgacatctgatctgattaaatctttaaataatcaattaaatctcgcgatttctttggaattaacacagctgcaaattacacaaatcagtgatcaaattcaatctaaattagagcagcaaagtttttgggtgaaaagtaataatcctattaatttagattgggtaaaaatgctgccaagagctttaattgaacagtttaatggtatgttgaaaaaattaggttttccaactaattatgacaatttaccttatttgctgatgtatttcttagggttatttattgtaggcggtgcaatttttaaatttaaaaatcgtattaaacaacaattaaacaaaattaatcgtgaaatacatcgtttagatacagatagtcagtggagtactccacttgccctgttattaacagcgtttttaacgctttctagtacactttggtttttagcagtttgccaaatgatcggcttctttttcttcaaaaatccagaagaattttggcattggtcatttagtatggcgggttattggtggttctttacattttggatttcattgttccgtccaaatggtatttttgttaatcattttgaatcttcaaaagagaatgcacaacgttttcgtggtgttatccagcgcattattattgtggttgtattgcttttaaatacttctgtgtttagcaatgtcactgatgcaggtttagctaatgatgtgttaggtcaaattaatactattgcggctctaattttctgtgcggcgattattgcccctcgttttaatcgagtacttcgttcttatgaacctgaaacaaataaacatcattggttaataagaattgtacaaattggtttgagattaattcctgtgggattaatcgtacttattgttttaggttattactacaccgctttaaatttaattgagcattttattcattcttatattgcttggtgtgtatggtggttagtacgcaatacgatttaccgtggtattacggtttcttctcgtcgtttagcacatcgccgtttagcagaaaaacgtcgtcaaaaagcacttgaaaataattatgaaaatatatcctctgatgatgtggttgcagtgggagagccagaggaaagtttggcgttaaatgatgtgcgtagccaattattacgttttgtagatctctttatttggacagcattattagggattttctactatgtatggtcagatttagtcaccgtagtgagctatttacgtgaaattacactttggcaacaaaccacgacaaccgatgctggcactgtaatggaaagcattactttatttaatcttcttattgctttggttatcgtaggaattacttatgtgttggttcgtaatatttcaggcattttggaagtattaattttctctcgcgtgaatctttcacaaggtacgccttatactattacgacattgctcacttatatttttatcgccattggtggtgcgtgggcatttgcaaccttagggatgtcttggtcaaaattacaatggttatttgccgcactttctgttggtcttggttttggtatgcaagagatttttgcaaactttgtgtcaggtatcattttgttatttgaacgcccaatccgagttggcgatgtggttaccattaatgaagtgagcggtactgtagcgaaaattcgtatccgtgcaattacattgattgattttgatcgcaaagaagtgattgtgccaaataaatcttttgtgacaggtcaagtgaccaactgggcattatctaacactatgacacgtttagtgattagcgttggtgttgcttatggttctgatttaacactcgtgcgccaattattacttcaagcagctgatgaacagccgactattttacgcgatcctaaaccatctgcttattttttaacttttggtgcaagtacactggatcacgagttacgtgtttatgtagaacaagttggggatcgcaccagtactacagatgcccttaatcgccgtattaatgaattatttgcagaacataatattgatattgcctttaatcaattagatgtatttatcaaaaataatgatacaggcgaagaaattccttttgttgatgtaaaaaaataaggggaaattatggctggtaatacaattggacaacttttccgtgtgacaacctttggggagtcacatggtattgcattaggctgtatcgttgatggcgtgccaccaaatctcgaattatccgagaaagatattcagccagatctagatcgccgtaaaccaggaacatctcgatatactacgcctcgtcgtgaagatgacgaagttcaaattttatctggtgtgtttgaaggaaaaaccacaggcacaagtattgggatgatcattaaaaatggtgatcagcgttcgcaagattatggtgacattaaagatcgtttccgccctggtcatgctgattttacctatcagcaaaagtatggaatccgtgattatcgtggcggtgggcgttcgtcagcgcgtgaaacagcgatgcgggttgcagcgggagcgattgcgaaaaaatatttacgcaaacattttggcattgaggtgcgaggttttttaagccaaatcggtaatataaaaattgctccgcagaaagtgggacaaattgattgggaaaaggtaaacagcaatccattcttttgtcctgatgaaagtgcgatagaaaaattcgatgaattgatccgtgaacttaaaaaagaaggagattctattggtgcaaaacttactgttattgcagaaaatgtacctgtaggattgggcgagccagtatttgaccgtttagatgccgatcttgctcacgcattaatgggaattaatgcagtaaaaggtgtagaaattggcgatggctttgctgtggttaaacaacgaggttcggaacatcgtgatgaaatgacacctaatggctttgaaagtaatcatgcaggcggtattttaggcggaattagttcaggacaaccaattatcgccactattgcactaaaaccaacttcaagcattacgattcctggtcgttcaatcaatcttaatggtgaagccgtagaagttgtaacaaaaggtcgtcacgatccttgtgtggggattcgtgctgtgccaattgcggaagctatggtggcgattgtcttattagatcatctcttacgttttaaggctcagtgtaaataatcctgtacctagggtagtatactctaggttagttcttcaataggactgaacctaggatatacttacctacagcaaaactttagaatgaataaaattttattaaaaacaaccataatttttaccgcacttttctctctgaacgttgttgcgtctcctctagattggaaaaaagtgaaacgccctattccaagtgaagatggtaaagcaagtcctattggtagttataccaacgggtgtattattggagcgcaagcattaccgccgaaaggtgaaggttaccaagttattcgtatgaatcgcaatcgttattatggtcatccaaatatgattcagtatattgaacgtttggggcagcgagctaaagctgctgggttaccaactatgttagtgggtgatattgccatgccgggtggcgggcggtttttaacgggtcatgctagccatcagatgggattagatgcggatatttggttaagaatgggcgaaatgtcagacgccgatgcgctgaattctgatggtaaaggtttattagttgtagatagaaaggcgcaacgagtggatgaacgagtatggaatagcaatcatgcgacgttaatcaagttagccgcacaagatccaaatgtgacgcgtatttttgttaatcctgcgattaaggtaaaattatgtcaaaccgctggcaatgatcgcggttggctacacaaagttcgtccttggtatggacacaactctcattttcatgttcgtttaacttgccccgcagatgcatcttattgtgaaaatcaagcgcctgtgcctgctggtgatggttgtggagacgaattatattcttggtttgaaccgccaaaaccaggtgcttcagtgagcaaacctaaagttacaccgcctgagccgtttttgtgccaacaaattttaaattccccgaatcggagtgaatggttagaatagcattaaggtaaatcaatatggatatcggcattgatcttttagcaatattgttttgtgttggttttgtcgcatcatttatcgatgcaattgctggcggtggtggattaattactattccagcgttgcttatgactggcatgccaccagcaatggcgttaggcaccaacaaattgcaagctatgggcggtgcattatccgcaagcctttatttcttgcgaaaaagagcggtcaatttacgcgatatttggtttattttgatttgggttttcttaggttcagccctaggtacattattaattcaatcaattgacgtggcgattttcaaaaaaatgctgccttttttgattttagctattggtctatattttttatttacccctaaattaggtgatgaagatcgaaaacagcgtttaagttacatgttatttggtcttttagttagcccatttttaggtttttatgatggcttctttggaccagggactggctcaatcatgagtttagcctgtgttactttgctaggatttaatctcccgaaagcgacggcacatgcaaaagtgatgaacttcacttcgaaccttgcttcttttgcgcttttcttattgggtggacaaattctttggaaagtgggtttcgtgatgatggctgggagcattttaggtgcaaatttaggtgccaaaatggtgatgacgaaaggtaaaaccttgattcgaccgatggttgttatcatgtcttttatgatgacggctaaaatgatttacgatcagggttggtttcatttttaattcggaaagcgcgcaaaagtgcggttaaaattaattacattttattatgtcggataatcaacaaaatttacgtttgacggcgagagtgggctatgaagcgcacttttcatggtcgtatttaaagcctcaatattgggggatttggcttggtattttctttttattgttgttagcatttgtgccttttcgtctgcgcgataaatttgcgggaaaattaggtatttggattgggcataaagcaaagaaacagcgtacgcgtgcacaaactaacttgcaatattgtttccctcattggactgaacaacaacgtgagcaagtgattgataaaatgtttacggttgttacacaagttatgtttggaattggtgagattgcaatccgttcaaagaaacatttgcaaaaacgaagcgaatttatcggtcttgaacatatcgaacaggcaaaagctgaaggaaagaatattattcttatggtgccacatggctgggcgattgatgcgtctggcattattttgcacactcaaggcatgccaatgacttctatgtataatccacaccgtaatccattggtggattggctttggacgattgcacgccaacgtttcggcggaaaaatgcacgcacgccaaaatggtattaaaccttttttaaatcatgttcgtaaaggcgaaatgggttattacttaccagatgaagattttggggtggaacaaagcgtatttgttgatttctttgggacttataaagcgacattgccagggttaaataaaatggcaaaactttctaaagccgttgttattccaatgtttcctcgttataacgctgaaacgggcaaatatgaaatggaaattcatcctgcaatgaatttaagtgatgatcctgaacaatcagcccgagcaatgaacgaagaaatagaatcttttgttacaccatctccagagcaatatgtttggattttgcaattattgcgtacaaggaaagatggtgaggatctttacgattaaaaatagggtttgaaagtcatattctcgaaaacggatattcaataaggtaaataagaaatggaagaaaaaattcggctgacgcaatacagccatggtgcaggttgaggctgtaaaatttcgcctaaggtgttagggacaattttacattcagaactggaaaaattttatgatccaaatttgctcgttggcaatgaaactgcagacgatgcggcggtgtatgatcttggtaatggaactgcaattatcagtaccacagacttttttatgccgattgtagatgatccttttgattttggacgaattgccgcgaccaatgccattagtgacatttttgctatgggcggtaagccgattatgggaatcgctattttaggttttccaaccaatgtattacctgcagaagttgcacagaaaattgttgatggtggtcgttttgcttgccatcaagcgggtattgctttggcgggtggacattccattgattcgcctgaacctatttttggtttagccgtgacaggtgtgattgacactgaaaaagtaaaacgtaatgcttctgcaaaatcaggttgtaagctttatatgacaaaaccgcttggtattggtattttgacgacggcggagaaaaaaggaaaacttaagccagaacatcaaggtttagccactgccgctatgtgccaaatgaattctattggcagtcaattttcccaagtggatggcgtcacagcaatgacggatgtcactggatttggtttacttggccatttaattgaaatctgtgaaggttcaaatctaagtgcggtagttttttcggacaaaattaaaaccttggacggcgtaaaagattacattgctcaaggttgcgtccctggtggaacagggcgtaattttgaaagttatggacataaagttggcgcattaacggaagaacaaaaagcgattttgtgcgatcctcaaacatcaggtggtttattagtggctgttgagcctaatagcgttcaaactataattgaaatagccaaagatactgacattgatttatatgaagtgggtaaattgaaacctaaatcagaatccgatatcgttgttgaagtaaaataaggaattttaatcgatcatcctaatgattaattaaattaccatgatccacatagcaaaaaaccttggaatatcccaaggttttttagattatcattaaatataatggaattatgcgcctaaacgctctttaatacgagctgatttacctgaacgttcacgtaagtagtaaagtttagctttacgtaccgcacctttacgtttaactgcgatagaatctacagctggagagtgagtttggaatacacgctcaacgcctacgccgttagatactttacgcaaagtaaatgctgagtgcaagccacggttacgaattgcaataaccacgccttcgaatgcttgcaaacgacgtttgctaccttcaactacccatactttaacttctaaagtatcacctgggcggaagctaggtacgttttgttttaattgttcttgttcaagttgtttgataatgttagacattgtttgatcctttattgatcctagatgtaactgaaactaactgttatgctcggcttgcgcctcttttaacagcttacgttgttcgtcagtcagagctaggccttctaagagctcagggcgtcggaaccacgttctctgtagcgattgttttaatcgccatttccgaatttcttcgtgatgtcccgacatcagcacgggtggtacagttaatccttctaacacttccggtctggtgtaatgcgggcaatctaataaaccatctgcaaaagaatcttcttctgcggaggcttgtttgcctaatacaccaggaataaaacgtgcaacagcatcaattaatgtcattgccggcaattccccaccagttagaacgtaatcgccgattgaccattcttcatcaatttcagtttgaatcaaccgttcatcaatcccttcgtaacgtccacatactaaaatcaatttctgattttgagcaagctcggttacgccgtcttgatcaagtttacgtccttgtggcgaaaggtaaatcacctttgcgccttctcctgccgctgcttttgcagtatgaatcgcatcccgtaaaggttgcaccatcatcagcattcctgggccaccaccataagggcgatcgtccacagttttatgcttgtcgaatgtaaaatttcttggattccaacattcaactttcagaagattatgttttacggctctacctgtaaccccaaattccgtaatcgctttaaacatttcggggaataatgaaattacccctatccacataaaaagcctactacattacgtttgtgcatacttgagattagaaaccagcgtcccaatccacttcaattgtttttgtggtgagatcgactcttttaactacttgttcatacaaaaacggaattaaccgctcttgttttccaaaagcatctttggtattggctttaaccactaatacatcattagaacccgtttccatcatttctgttactgttcccattgtataaccttctaagtttacgactgtacaaccgattaaatcgtgccagtaataatcgccctcttctagttctgggaaaacagataaatctacaccaatttcaacattcgctaaaatttgtgcagtttcacggtcatcaacgccttttaatttaacgatgatttcgtgattatgataacgccagttttctaattcaattgattgccattcacctttgatttttaaaaaccaaggttgataatcaaaaatgctttcagcttgttctgttgatgaataaatacgcaaccacccacgaataccgtaggttgagcctaatttgcccacaacttcaatatgttgttgttccatatttttcacctatcttagtttgagaactaaatcaaaaagcaaaattatgctgctttttgtgcttcttttaccaagctcgcaacacgatcagaaagtgaagcaccttgagcaacccagtgatttacacgctcaagattaatgcgaagacgttctgcattaccttgtgcaattggattgaagaaacctacacgttcaatgaagcgaccgtcacgaggtgaacgactgtcagcgactacgatttgataaaatgggcgttttttagctccgccacgagataaacgaatggttaccataaccttcctctaaatgtttaattactaaaagaatattctcaaattcgaaagtgatttgagaatatagcttacttttttctctgtatatatagacaaaaagcctgcgaattttatacttttcaagcaaaattgcaagttttgtatgcataaagtaggttgtattccttttaattatcattcacaatttattttgttttgcgatataatacgaggcatccagctgttttaggtcaaatttacgcgtatagcggtattttagcttgataaaatatcagttaaatgaggtttattatgaaaattagttttcattctgtgttaattggattagcatcatttattggtgttcaacaaggtgtaatagctagtccatcttctcatcaatcaatatccactgaatcagctgaggctttgaagcaacaattttcaatggctttagctaaacaagacaaacaacaaattacaaatttacaaaaaaaacttaccgcacttttttctttacctccccaatttcttgataatcagatccaaataagcgaaaaaatcctcactcgcatttttaaaacagataaaaatctcacgcctaaatttcttgattacttatactttgagccaataaatactgttgatgctaatttaattcaggaaatgaagaaaaacttactggtgtcttttttagcaaatgatcaggcaaaaatttatattcgtcaaacagataattcagagcaatttgttcagactttaatggagcggggagcaaaagcagatcaaattatattactgtctttgaatgccaaaggtatatttcaaaaaattattgaacaaatacgtcaagattttccgaatcagactattttttcgattactgaaaatcgtattagtttgattactccttcttcagaaattaagtctcgccttgctttagcaaatatgatgttcaatcgccaatttaaaggtgtggaagttgatgatttctcgtatttagatcaacctcgagaaaatttacagcacaataatgatgcaattcgttacaaaacctttcaagcaatgctagaaggtttaaattaatcccttaccaataggagtttttatgcttttatccaaaaaatcagctacctttgcactcagtgcatttgcgatgcttttcactagtgtagctcttgccaaagaggcaccacaagctcacaaagctgtggaattaagtattttgcacatcaatgatcaccattcttatttagaaccgcacgaaacacggattaatttaaatggtcagcaaaccaaagtggatattggtggtttttctgctgtcaatgcaaaacttaacaaattgcgtaaaaaatacaaaaatccattggtactgcatgcaggcgatgccattactggtacgctttacttcacgctgtttggtggttctgcagatgcagctgtgatgaacgcaggtaattttcattattttactttaggtaatcatgaatttgacgcaggtaatgaagggttattaaaactgcttgaaccattaaaaatccctgtgctttcagctaatgtgattcctgataaaagttcaattttgtataacaaatggaaaccttacgatattttcactgtggatggagaaaaaattgccattatcggtttagataccgtgaataaaacagtgaattcctcttctccgggtaaggatgtgaagttttatgatgaaattgctactgcacaaattatggcaaatgcgctaaaacagcaaggaattaataaaattatcctactttcacacgcaggtagtgaaaaaaatatcgaaattgctcaaaaagtaaatgatattgatgtgatcgttactggcgattcacattatttatacggaaatgatgaattacgtagtttaaaacttccagtaatctatgaatatccacttgaatttaaaaatccaaatggagagcctgtatttgtaatggaaggctgggcttattctgccgtggtgggggatttaggtgttaaattcagtcctgaaggtatagcgtctattactcgtaaaattcctcacgtgttaatgagttctcataaacttcaagtgaaaaattcggaaggtaaatgggctgaattaactggcgatgaacgtaaaaaagcacttgatactttaaaatcaatgaaaagtatttcacttgatgatcacgatgcaaaaaccgataagcttattgctaaatataaaagtgaaaaagatcgcttagcacaagaaattgtgggcgttatcactggttctgcaatgccaggtggttcagcaaaccgtatcccaaataaagcaggatctaatccagaaggttctattgcaacgcgttttattgcagaaacaatgtataacgaactcaaaacagtggatttaactattcaaaatgctggcggtgtacgcgcagatattttaccgggcaatgtaacctttaacgatgcttatactttcttacctttcgggaatacgttatatacctataaaatggaaggttcgttagtgaaacaagtgcttgaagatgcgatgcaatttgctttggttgatggctctacaggcgcattcccttatggtgcaggtattcgttatgaagcgaatgaaacaccaaatgcggaaggtaaacgtttagtgagtgttgaagtcttgaataaacaaacccaacaatgggaaccgattgatgataacaaacgttatcttgtcggaacaaatgcttatgttgcaggcggtaaagacggttataaaacctttggtaaattatttaacgatccaaaatatgaaggcgttgatacctacttgcctgatgcagaaagtttcataaaatttatgaaaaaacatccgcactttgaggcttacacttcatcaaatgtgaaatttaatgcttcaactgatgcattacctaaaaaataaaattgaaaaataggctaaaaatagcgcgtatttaacgcgctatttttgttattagtcctaggtttgaagacttcatagatgattaagaattttaactattccatatttagatgctttctcgtggaaaataaattccctataaaggttgaaaaatagggtgatttattgcgataatctaccccattttttgggagatctttctatcttctgcatttttacgcagtttattttcattagaaatgatcgaattttatttcacttttaatttaattagataaaaaacaatggcggaaaaacgtaatatttttttagtaggaccaatgggtgcaggtaaaagtactatcggtcgtcaattagcacaacagcttaatatggattttattgattccgatgcagtgattgaagaacgtacgggcgcggatattagctggatttttgatttggaaggcgaagacggcttccgaaaacgtgaagaacgcattattaacgaactcacacaaatgcaaggtattgtactttcaactggtgggggagcagtgctttctaaggaaaaccgtaattatttatcagcacgtggtattgtaatttatttagaaacaacggtggaaaaacaattccaacgcactcaacgtgataaaaaacgtccattgctccaagatgcagagaatcctcgtcaagtattggaagatttagcaaaaattcgcaatccgctttatgaagaaattgcggacatcactttgccaactgatgaacaaaatgccaaagtaatggtaaatcaaattgttgatttaattgataatatgaatggattaaatggtgcgctttaaacacacctaaggataaattatgttgtgcgtcaatgtggaattgcaagagcgtcgctatcctattttaattggtagcggattgttacaagatgaacgtagttacccgattaaacgtggggatcgcgtgatgattgtaacgaatcccacggttgcacagttttatcttgatacagtcatctatgcgttggaaaaacgtggttgcgtagtcgatcatgttttattgccagatggcgaaaaatacaaaacacttgaatctttaaacttaattttcaccgcacttttgcaagataatcatgggcgagataccacgattattgcattgggcggcggcgtaattggcgatgttgctggctttgtggcggcaagttatcagcgcggtgtgcgtttaattcaaatgccaaccacattgctttcacaagtggattcttcagtgggcggtaaaacggcggttaatcatgaattaggcaaaaatatgattggcgcgttctatcagccatcaatggttattattgatacgctcacgcttaatacgcttcctaaacgtgaagtaaacgcggggcttgccgaagttatcaaatatggtgccattttagattacgaattttttgaatggctagagcaacatattgatgaacttgtcgctttgcatcctgaggcgcttcaacattgtatttctcgttgttgccaaattaaagcagatgttgttgcgagagatgaaacagaaaaaggcgatcgtgcattgcttaatcttggacatacttttggacatgccattgaaactcacttaggttatggaaactggcttcatggtgaagctgtttcgacgggaatgatgatggcagcggtgctttcggaagaacttggagatatttctattgcagatgtgtctcgccttgaaaaattacttgctcgtgccaatttgcccaccgtatcaccggatacgatgcagccagaagactatttaccgcatatgatgcgtgataaaaaagttctatcgggtaaattgcgtctggtgttactcaaatctctaggccaagcttatgtggcgaatgataccgatcataccctcgtgttaaacgcaattcgtcgttgtactcaaacggattaagatgttacgtccgaaaaaacaatctttaaaacctaagttaaaacaccgtccatttttaaaatgggcggggggaaaatttcgtttaacggacgagataaataaagcctttccaaacaaaaaaaactgcttaattgagccatttgtgggtgctggagcgatatttctgaattctaattttgaacgctatattttggcagatatcaaccctgatttaatcaatctattcaatattgttaaagaaaatgtagagggttatattgaagattgtaagccgattttcttcgctgatgatgccaatacacccgattattactatgctaaacgtcgccaattcaatgcatcaacagatcctttcgaacgttcgattatttttttatatttgaaccgttttgggtttaacggattatgccgttataacagcaagaatgaatttaatgtgccttttggagcttacaaaactcattattttccagaagatgaattacgttatttcgctcataaagcgcaaagtgcggtatttttatgctgtgattttcaaaaaacttttgaatttgccgataaggattcggtgatttattgtgatccaccttatgctccgctacaacaagagactaattttactggttatgcagggaatgagtttggactagtgcagcaacgtgctttggcagatttagcgaaatctatacaaaaagaaaaacaaatttcgatattgatctcgaatcacgatactaaatttacgcgtgaaatttataacggtgctaaatttaaacgggtaaaagtccaacgttctattagccaaaacccagaaaaacgcgtaaaagtgaaagaattgattgcgatatttggtgctcgtaaataataaaaatagcccttactttatactaaaagtaccaaaatcgtaattttaaaaccacaataaaataatatattgtgtattaccatttatctcttacagtacctatatacttttttgatactaacccaaaatactcacaagtctgtaattttacctgtaatccttttgttttatcagaatgattatctagaaaactcatccaatcatcagaataattattatcctatagtagaatgtaaattattttaataacgccttatttgtactgtggataattcatcaaaatttaagcctgttatgctttattctttagtgtataacaaataggataaaaatggaaaaagcaaaaccatccaagcaaagaaattttaatcactgtcaaggagtacattattgaatttggtaataaaccgttaggtttaaaagatactacacccaaatgccactgccctatttgtgctcaagttttatttgagaaaaatgttaatacagtgccatcctctaatagcaatttttctaattacccaaaaagcgaattctgccccataaaattaaactaaagcaatttataccaatcatattttccattatcaccaaataaaacgcatggactgaattaaaaaattcattcagaaaaaattggcaaaaatattatcgtcaaattagtttttcggcaaaaaacttataacctattgaatttattatattagctaatcaacaaaaaatttgggaatacaataaacttgaagagtatcaaattccttatattctattaacattagcagactgtcctaaccaaaaaggaacatataaaaataaacgtcactgctggtttagattttggtttgatgcttcaattcaaagatatgaagatatttggaataatagttctttaccagtattgtggacaacctattattacctatcagggaaacaaagaaaaccttcagaaataaatctaaaaaacatgaattatttcatcatggataaaactttcttagaacaagaaatattacttccccaatttattattcaaaatatagaacggtggtttaaaacacacaattttgtatagacaagtcagcacctaatactatttcatgacgaagatcgcctttttctttaaaaaggcaaaaataatgccattaatcaaccatgccagtaatgtcgccaccaataaatctattgggtaatgcatgcctaatcgcacacggctaatcaacatcaataagccccacactgcaatacccaccaccagcaattttgctttaaaagaacggttacccaataattgggtaaagccaacagcaagcattagccaagttgccgcaaaaatcgtatgccccgaggggaaagaataccccgtttcattttcataatgatgaactaaccaagctggtgtgatagcatccatcgaataaaaactcttagctatttctgcacgcaaagtgcggtcatttttataaaaattttcaggtgttgaatggatttgctctgctaaataaacggtgaagggacgaggttcttcaaacaatgtttttgcccctgtttttgcggcttgagtggcaataactgaaatccccatcacaattacgcctaatatccattgttttggatttttgaataaaaatgcgaacaaaagcgtaaataacacacaagtgatcaaggcataaggtacgctacccgtttcagtgagcaaataaagccaataatcagcctgggttaattggctattgccatgccactgataggaaataccccaaataaaaaatggtacaagacaaagtaataacgtatataatgacaaccttttaaacatgctcgccccttgataataaaaaataacgcgcgcattctaacagaaatgactacgaataaggatcactttatggcaaaaattcagctagttgcgcaagccaatttacccactgaatatggtattttcagaatggtgggatttgaatttccagataccaaaaaagaacatgtcgccttagtaatgggcgatatttctaatgctgacgaacctgtgttagcacgcatccattctgagtgtttaactggcgatgcgcttcacagcttaaaatgcgattgtgggttccaactggctacagcgttgaaacaaattaaagaagaaggacgcggtgtcttaatttatcatcgtgaagaaggccgcggaattggtttgattaataaaatccgtgcgtattctttacaagataagggaatggataccattgaagccaatcttgctttaggtttcaaagcggatgaacgcaactttgaagtctgtgccgatatgttcgagctacttggtgtaaaaaaagttcgcttgatgaccaacaacccagaaaaaatggaaacaatgaaaaaggcgggtatcaacgtggttgagcgagttccacttaatgttggcgaaaaccgctacaacacaaaatatcttgataccaaagcaaaaaaaatggggcattacattgtgcataacaatgatgaacaacatttaatgacctgcccgcattgccaggaagagattatttaacaaataagatatgttaaaaaagccatactgttatattgaacagtatggcttttttatttaaactctcaattacggaataatcgaaggattttttagcatattgctaaaaacgagaaaccccgtctcgtattccaaagatcggggcttatcaggagtaagtaaaatgaaaaaaacgctctttttcattttcttgattatctgttgtttagttagctgttccggaacagttatctaagataatcgcaaggggacgatgtaggagtcgtccccaatgcctccaatcttaaagaattctttccttgattgcaagggcaattattgactttgaacctttctccacaaatctttactgtaaatgacaccgacagaatttacttgcgcgcccattatacttggtgcgagataaactggcgtactatattgaaaaataggtaacactaaatgttcttgctgaatcatctctttcaattttacgtaattttctaaccgcactttttctgatgtcgtcgtcattgcattttcaaataaacgatcaaattccgcatttttatagccatttttgttatctgggctttttgaatagaataaatttagaaaggctgcaggatcattaaaatcagcacaccagccagaacgaattaattgaaaatcgccttttgtgcgagctgtttgcaattcttgccagctcgtcccttgattttcaactcgtaataaatcagattgtgataattgatgatttaatcgcattgcaatggtttgattcagagatgaatcatcataacgaatacgtaatttcaatggacgagtttcattaatttgattttgggaaagaagctgctctgcaacaactggctcccaaacagattcttgctctccgagcatcgattttggcaaaaaagtattgttaggatgaagatgagcaatatctgcaaccaaattcttggtagaaatcatcgaaacaatcgcttttcttaccgcacttttttgcaatgttggatccgaaagattaaattcgtaaaaataagtacaaagttgcggataatcttggatattctgatcgacttttttcggatttaatacaacatcaaaattagacaaatctgcatcttctgtaattttttgatacttcacttgttgaaatatcactttttcttttgcccaataataaggattggcaattaaaatatgctgattttcagactgactttgtaactgataggcgccattgctgataagcatctcagtcgatttagcatagcgaggcaaaagactaacatgtgccagcatagaaggtaaatatggcgatgctttatctaattcaatgcgtaaagtgcggtcattttcggcaaacaatcctagagattcaacagataacgctttttccaatactgccttcgcatttttcagattcataaaagccaaataatttttaattgggctttcagattgagaaagtgtttgccaagattgtacaaaatctgatgcagtgataggctcgccatttgaccatttagcattttcacgcaaagtgaaaatccaagttttattgtcttcggtttgccaattttctgctacagctggaacaagattaccttgcacatcataagctgttaatccttcaaaaagatctcgtaataattgaatttgttcttcgctttgtgcttgccaaggttgcaaagtcaaatcgctataaacgccacgttttaattcaactcggttagattctaattgagtatttttttgtgtctcaatttgtggcgaaataggcttaggactatccaatttatcacaagcctccaccgtaaaaataatagaaaaaataaccgcacttcgttggcacaaagcgaacaaattattcattttcggttttaatccaaaataagaagaaccaaaacttaatacaaatcaacgcaacaataacactacgccctattacacttggcgtgaaataaaaaccaattagtagcattgtggtaacaaaagtcaaaataaaaattttggtatttttctttaatgatcgattttcatgaaaggacttgagatgtttttgataaatacttgtgcctaaaaaccattgttctaagcgttttgaaccttttgtgaagaaaaataaagtaagtaataaaaaaggcgtggtaggcaaaagaggaagaaaaatcccaatgatgccaattgcaagtgaaagaaaacctaaaataatgtaaataattttcataatgttcctaataaaaaagaaaatgcaaactattattactgattttttagatttttcaaccttgatattatagaatttgccgtcacataaaaaacagttttcaaaaaaggaacatttatgtctatgtcaaatccattacttaacattcaaggcctaccgccattttcacaaatcaagccagaacacattcgaccagctgttgaaaaattaattcaagattgtcgcaatacgatagaacaagtgttaaaacaaccgcactttacttgggaaaatttcattttgcctttaacggaaactaatgatcgcttaaatcgtgcttggtcgcccgtttctcatctcaattcagtaaaaaatagcactgaattacgtgaagcctatcaagagtgtttacctttactttctgaatacagcacttgggttgggcagcataaagggctttataatgcttatttagcgttaaaaaatagtgctgaatttgccgattattctattgcacaaaagaaagccattgaaaattcactgcgtgattttgaactttcaggcattgggctttccgaagagaaacaacaacgttatggcgaaattgtggcacgcttatcggaattaaattcacaatttagcaataatgtattagatgccacaatgggttgggaaaaactcattgaaaatgaagcagaacttgctggcttacctgaatccgcactacaggcagcacaacaatctgccgaaagtaaaggattgaaaggttatcgttttacgttagaaatcccaagctatctccctgtgatgacttactgcgaaaatcgtgcgttgcgtgaagaaatgtaccgtgcttatgcgacacgcgcctctgaacaaggccctaatgctggcaaatgggacaacagtaaagttatggaagaaattcttacgttacgcgtggaactggcgaaattactcggttttaatacttataccgaactttcacttaccacaaaaatggcagaaaacccacaacaagtgcttgatttcttagatcatcttgccgaacgagccaaaccacaaggcgaaaaagaattacaagaattgagagattactgtgaaaaagaatttggtgtcactgaacttgcgccttgggatattggtttttacagcgaaaaacaaaaacaacatttatacgctattaacgatgaagaacttcgcccatattttcccgaaaatcgcgtaatttcaggactgtttgaattgattaaacgtattttcaatattcgtgcagttgaacgcaaaggcgtggatacttggcataaagatgtacgtttctttgatttaatcgatgaaaatgatcaactccgtggcagtttctatcttgatttatatgcacgcgaacataaacgtggtggtgcgtggatggacgattgtatcggacgtaaaagaaaactcgatggcagtattcaaactcctgtggcttatttgacttgcaacttcaacgcccctatagggaataagccagcgttatttactcacaatgaagtcaccacgctattccacgaatttgggcacggaatccatcatatgctcacgcaaattgatgtatccgatgtggcgggtataaatggcgtgccttgggatgctgtggaattaccaagtcaatttatggaaaactggtgctgggaagaagaggctttggcgtttatttcagggcattacgaaacaggcgagccgttgccaaaagaaaaactcacgcaattgttaaaagcgaaaaatttccaagctgcgatgtttatcttacgtcagcttgaatttgggatttttgatttccgtttacatcacacctttaatgcggaaaaaaccaatcaaattttggatacacttaaatcagtgaaatcacaagttgccgtcataaaaggcgtagattgggcaagagcgccacacagcttcagccatatttttgcagggggctacgccgcaggttattacagctatttatgggctgaagtattatcggctgatgcttattcacgctttgaagaagaaggtattttcaacccaatcaccggcaaatcattcttagatgaaattctcacgcgtggtggctcagaagagccaatggaactcttcaaacgcttccgtggccgtgaaccgcaattagatgcgttgttaagacataaaggaattatgaactaatacgtcaaactatagggcatgcacaacatgccctttctcaaatattttcctcgacataaaaacatagtaaattttaaccgcactttatctagacaaaacctgcaaacgagacattatttttacaaatagctgtaagataaacgcatagaaattcacgcagaatagactaatttcctgtataatttttcacatatctatccaactcattacacaaaatattctgaggattttatggttgctgcaattcaacaacgtgccgaacttcaacgccgtatttggcaaatcgctaatgatgtgcgaggctcggtcgatggctgggacttcaaacaatatgtgcttggcacacttttttaccgttttattagcgaaaattttgccaattacattgaagcggacgatgaaagcgtaaattatgcccaattacctgatgaaatcattacacctgacattaaaacagatgccattaaaaccaaaggctactttatttacccaagccaattatttaagaatgtcgcagctaatgctggcagcaatcctaatttgaataccgatttaaagcagatttttactgatattgaaaactcagcgacgggctttccgtctgaacaagatattaaagggttatttgccgattttgataccaccagcaaccgtttgggcaataccgtaaaagataaaaacgaccgcttaacggctgttttgaaaggcgtggctgaacttgattttggcaaatttgaagataaccacattgatttatttggcgatgcatacgaatatcttatttctaactatgccgccaatgcaggcaaatctggtggcgaatttttcaccccacaaagtgtttccaaactcattgctaaaattgcaatgcacgggcaaacctcggtcaataaaatttatgaccctgcagcaggttctggctcacttttgcttcaagccaaaaaacaatttgatgaacatattattgaagaaggctttttcgggcaggaaattaaccataccacatacaaccttgcccgtatgaatatgtttttgcataacatcaactacgacaagtttgatatcgcccttggcaacaccttaatgaatccgcaatttggcgatgataaacctttcgatgccatcgtttctaacccgccttactccgtgaaatgggttggctccgacgatcccacattgattaacgatgaacgcttcgcccctgctggcgtacttgcaccaaaatccaaagcggattttgcctttattttacacgcattaagctatctttcaggcaaaggcagggcggcgattgtctccttccctggcattttttatcgcggcggtgcggaacaaaaaattcgtcaatatttggtggataataactatgtggaaaccgtgattgcacttgcaccaaatttgttttttggcaccagtatcgcagtgaatattctagtgctttccaaacataaacctaatacccaaacccaatttatcgacgccagcggtttatttaaatccgccaccaataacaacatgttggaagaggaacatattgagcaaattctcaaactgtttgccgataaagaagatgtaccgcatttggcaaaattagttcccattgaagaaatcgccaaaaatgaatacaaccttgcagtgagttcgtatgtggaacaaaaagacactcgcgaagtgattaatattgatgaactcaatgcggaaattcgtaaaacagttgctaatatcgaccgcttgcgtgccgagattgataagattgtggcagagattgaggggtaaaacaccatgaaaaacaaccgcacttttttagaaaaattattgaatggggctgaggttgagtggaagctactgcctttagtctcagaaatgcaacgcggaaaaacaataactgcaaaatctacaaatgagggaaaaattcctgtcattagtggaggacaaaaaccagcttattatcatagcgaatcaaaccgtgacggtaagactattacggttgctggtagcggagcttatgctggctatataatgtactgggaagagcctatttttgttagtgatgccttttcaattaaaacagatgaatctttattacaaataaaatacgtttaccattttttattgcaaaatcagcaaaaaatttatgcaatgaagaaagggtctggtgttccccacgtttatcctaaagatatcggaacactaaccatccccattcccccactctccgtccaaaccgaaatcgtaaaaattttggacgcattgacagcacttaccagcgagcttaccagcgagcttatactacgccggaagcagtatgaatactatcgggagaaattattaagtgaagaagagcttgggaaggttgggtttgagtggaagcctctaggagaagtaacaaacataaaaacaggtcaagcagttagtaaatattcaatttcacaaaatcctggaatatatcccgtcattaacagtggtcgtgaacctttaggattcattaatgagtggaatactgaaaatgacccgattggcattacaacaagaggtgctggagttggctcaattacttggcaagaaggtaaatattttcgaggaaatcttaattattctgtcactgtaaaatcagattataaattaaatattcgctttctttaccatatattgcttcattttcaaaaagagattcataatttatgctcttttacaggaattccagcactaaacgccagtgagctaaaaaaattagaaatttctattccagctatcgaagaacaacaacgtatcgtttcaatcctagataaatttgaaaccttaaccaattccatcaccgaaggcttgcctttagcgattgaacaaagccaaaagcggtatgaatattaccgagaattattattgaatttccctggcagagaataatatgactaaaagtttagacaaaattgcaaaacaattaagagattctgataaaaaggttaatctaatttacgcctttaatggaagtggaaaaacccgtttatcaaaagtctttaagaatcttattgcacctaaagaaaatcatgacaatgaagaagatctaacacgaagaaaaattctttatttcaatgcctttaccgaagatttattctattgggataatgatctacttaatgacacagaaccaaaattaaagattcaaccaaattcttttattcgctggttgattagagatcaaggggatgaaggtaaagtaattggaaaatttcatcattattgtgatgaaaaacttatgcctaaatttgatatagaaaataatcaaattacattcagttttgcacgtggagatgatacgcctgaagaaaatataaaactatcgaagggggaagaaagtaattttatttggagtatttttcatacgttaattgaacaagttgttgcagaattaaatatctcagagcctagtgaacgcactactaatgaatttgatgaacttaaatatatctttattgatgatccagtaagttcattggatgaaaatcatcttattcaattagctgttgatttagcagaattagtcaaagatagtcccgatactataaaatttattatcaccacacacaatcctttattttataacgttttatacaatgaacttggagcaaaaaatggttatattctaagaaaagatgaaaataagaatgaaaaagaaagatttgatcttgaggtgaaacaaggtggttcaaacaagagtttctcctatcatctttttctaaaaaatctacttgaagaagttgaacctaaagatattcaaaaatatcacttcatgttactgagaaatttatatgaaaaagctgctaactttcttggttattcaggatggtcaaatctattacccaatgatgatgcaagacaaagctattacactcgtataatcaattttactagtcactctacgttatcaaatgagataatcgctgagccaacagatgccgaaaagaagattgttaaatatttacttggacatctaattaataattatggtttctatatagaagaaaatattaaagacccacaaactgataatataacagagtaaaaatatgaacgacttaatcatctacaacactgacgatggtaaatctcacgttgctttattagttatcgaaaatgaggcttggctgactcaaaatcagcttgcggaactttttgacacctctgtaccaaatataaccactcatataaaaaacatattacaagacaaagagttagatgagttttcagttattaaggattacttaataactgcccaagatagcaaacaatatcaagtaaaacattattcccttgatatgattctcgccatcggctttcgtgtgcgcagccctcgtggtgtacagtttcgtcgttgggcgaatacgcaattacgtacttatttagataaaggttttctattagataaagagcggttgaaaaatcctcaaggtcgatttgatcattttgatgaattactggaacaaattcgcgaaattcgagccagtgaattgcggttttatcaaaaagtacgagagttatttaaattatccagtgactacgataaaacagataaagtcactcaaatgttttttgcagaaacacaaaataagttgatttatgccattacacaacaaaccgccgcagagcttatttgtacgcgtgcaaatgccaaattgcctaatatgggtcttacctcttggaaaggtgctgttgtacgtaaaggcgatattattaccgctaaaaactatttaactcatgatgaattagattctttgaatcgtttagtgatgatctttttagaaagtgctgaattacgcgttaaaaatcgtcaagatctcacattaaatttctggcgtaataatgtcgataatttaattgaatttaacggttttccgttgcttatcggtaatggaacccgaaccgtaaaacaaatggaaacctttaccaaagaacaatatgccttatttgatcaggtcagaaaacaacaaaaacgcatacaagctgataatgaagatttagaaattttagaaaactggcagaaagatctgaaaaagcaaaagcattaaggaactacttatgacccaatacaaaactatcgctgaatccaataattttatcgttttagatcaatataataaatttgtggaagaacctaatgctggttaccaaacggaagggagccttgagcgtgagtttattcgtgatttacaggctcaaggctatgagtatttacaagggcttaataatcacgatgaactgattaaaaacttacgtgttcaattacaacggttgaataatgttattttctccgatgcagaatggcaacgttttttagaggaatatttggataaaccgagcgataatctgattgagaaaacccgcaaaattcacgatgattatatttatgattttgtgttcgataacggacgcattcagaatatctatttgctagataagaaaaatcttgccaataattctctgcaagtcatcaatcaatttgagcaaacaggcagctatgataatcgttatgatgtgacaattttggtgaatggtttaccccttgtgcatattgaactgaaaaaacgtggcgtggcgattcgtgaagcctttaaccaaattcaccgttacagcaaagaaagtttcaataaagaaaattctctctttaaatatattcagatttttgtcatttctaatggcacggatactcgctattttgctaatacgactaaacgcaataagaatagctacgacttcacaatgaattgggcaacggcaaaaaatactctgattaaagatttaaaggattttaccgcaactttcttgcaaaagaatactttgctcaatgtgttggtaaattactgcgtgtttgatgtttccgacactctattgattatgcgtccgtatcaaattgccgccactgagcgtattttatggaaaatcaaaagttcatatcacgccaaaaattggagcaacaaagaaagtggtggctatatttggcataccacaggctcaggcaaaaccctcaccagttttaaagcatctcgtcttgcgactgaacttgattttattgataaagtcttttttgtggtcgatcgtaaagacttagactaccaaacgatgaaagaatatcagcgtttttcgcctgatagcgtgaatgggtcggaaagtaccgctgggcttaaacgcaatattgaaaaagatgataacaaaattatcgtaaccaccattcaaaaattgaataatttaatgaaaagtgaagaaaacctgtctatttatcaaaaacaggtggtctttattttcgatgaagcacatcgctcccaatttggcgaagcacaaaaaaatctaaaacgtaaattcaaaaaattctatcaatttggttttactggcacacctattttccctgaaaacgcattaggtgcggaaacgacaacaagtgtgttcggtacggaattgcattcttatgtgattaccgatgctattcgtgatgacaaagtactgaaattcaaggtcgattacaacgatgtccgcccacaatttaaagccttagaaacagaaaaagatcctgaaaaattaaccgcacttgagcagaaacaagcctttttacaccctgagcgtattaaagaaatctcgcaatatttgcttaacaattttaaacaaaaaacccaccgcttgaatgccacaggtaaaggctttaatgcaatgtttgcggtaagcagtgtggaagcagcaaaacgttattacgaaaccttacaaaatttacaggcagagcaggagcatccgttaaaaattgcaacaatcttttcgtttgccgccaatgaagaacaagatgcaattggcgatattccagatgagacctttgaacccactgctctaaacagtacggcaaaagaatttttaacaaaagccattgatgattacaatcactactttggcacgaattatggcgtagatagtcaatcattccaaaattactatcgcgatcttgccaaacgtgtgaaaaatcaggaagtggatttactgattgtagtcggaatgttcttaacaggctttgatgcccctacgttgaatactcttttcgtggacaaaaacttgcgttatcacggattaatgcaggctttttctcgcaccaaccgcatttatgacacaactaaaacctttgggaatatcgtcactttccgcgatttggaacaaaataccattgatgcaatcacgctatttggcgatgacaataccaaaaatatggttttagagaaaagctacgaaacctattttaatggtgatgaaaatcaacgtggttatttagaggttgttcaagagctacaaaatcgctttcctaatccaacagaaatcgaaacagagcaagataaaaaagagtttgtaaaattatttggcgaatatctacgtgtcgaaaatattttgcagaattacgatgagtttgcagcattgcaagccttacaagcggtcgatttaaatgatccgattgcaatggagaaattcaagcaagtacattatgtgaatgatgaacaaattgcagaaatgctgaaagtacccactttaccagtaagagcggagcaagattatcgttcaacttataatgatattcgcgattggctacgccaaagaaaagaagggaatgataaagataattcgccgataaattgggacgatgtcgtatttgaagtggatttattaaaatctcaagaaatcaatttggattatattcttgcgttaattttcgagcatcataagaaaaaccaagacaaagaggtgttaattgatgaaatccgccgcacagttcgttcaagtttaggtaaccgtgctaaagagagcttgattgtcgattttatcaaccaaacaaatttagatgatattcccgataaagcgactttaattgactcattcttcctatttgctcaagcagaacagcgaaaagaagcagaatccttaattcaagaagaaaatttgaatgtcgatgcagcaaaacgctatatcagcacttcattaaaacgcgaatatgccagtgaaaacggcacagcgttaaatgaagtattgccaaaaatgagtccacttactccacaatatctcactaaaaagcagacaattttccaaaaaattgctgcatttgtagagaaatttaaaggggttggtggaaagatttaaatttaatatatcaacaattagacatcttattaagacataaaggcattatgaattaataatacaaaacgtaatgatcaatatttaactagtcgtgataataaaaacagctccaatttatacttggagctgtttttatatcgataaacttattttttacgtgctaaaattcgatttgcacactctgctgcagctgttaagccacctgccatcataataatatctttaatcactaaacgaccaactccagataaataagggaaaccataggctggcgttggtaaatctccacctagattaggcacccaagcctcgggcgttgtgattaaaaatgacagcgtgactattgacatgccaaatgtcagtaggcctcctgctaaacctgccgttgcattccaaataccagctaaagtaagaataccaacagtaacaataattgctccaataatgtaagaagccgtataggtgccattttctttatgccattcgatgttttttgcaaccatctttccttcaggatttttgtgtagtgtatattccatcactaactctcctttatcattcggcactaaatttggccctttttcatacatatagctaaaaaatgggctatttgatacaaagtgggcaattccatctgcctcatattgacaaactttcaaaccaccgatccatgccattacaataaaaatagcaatacggataaaattaataaattgacgctgcattggtgcaacaattctcgcgacaaattcaacaaatgtattaaatactgacatataaatttccacataaaagtaaataaaattgagagcctaattctactcgctttaatattaaaaagcaaaatcaattccctttaatataaaggtaaataacggagaaatttgaaaagttttactaattaaaataaaatttgattttcccattttaagcctatttattatctttaaatcacatttaaataatctttacacaactaccttatgatattaaaatttacaaaatttaagcaaatcctccacatcttctaaccaaagatttccaatttcatcaatcaattctccacaattaaaaacatcagaatttttagccgcactttctaaagtatccgctaattgacgtaaatgatttaaccctaccgatgccgctgcgcctttaattttatgggcggtatcttctgtttctttcatattatcttttgataattgagccagataatttggcatagtttgtttgaataaagataaattttctaaaatttgtttttttccaagtgtttctatcagcgctaaatcaaactgttctgaaagctcattatcatcattcatttctataatagattcgctttcatctgcaaaaaattgctgtagacaatggtgtaaatccttaattgaaatgggtttacgtaatacgccatccatgcccatttctaaatattcttgctcgctttgcataacattcgcggtaaaagcaatcattggcggtaaaaaatcataaataccgttttcatagttctctcgcaaatattgggcaatttcaaaaccactcatatctggtaatttaatatcgagcaatagaatgtcgtaaacatttttctcaaataaagtaatcgcctgcttgccatttgtcgcaacatcaacatgatgcccaagtttttctaaaatagtttttgcaaccataatattgagatcaacatcttccactaaaagaatattcaaggatggtatatttttcttaacagattctttttcagaaatttcctgagcgtggagagtaagatggaaagtcgcgccttttcctcgctcactttcaactgttaaatccccttccattaactgagcgagatttttagaaatagccaacccaataccgctacccgcactttgctgacggctttctttcacttgataatacatttcaaaaatatgtttttgttcttcaggtgaaatccccattcctgtatctttcacaataaaatggtaacaatcctgatttctcataattttaagaataatatttccctgatccgtaaacttcaccgcattactaattaagttccacaaaatttggctcaagcgaacacgatcaagattcaaccaattaggcaaattaggttcaagctctaaagaaaaaataagatttttttctttggcgaggaaactagcaaaattataaatatcgtttaataaggcggggaaatctgttggctggcgatttaattcaattcggctggcatcaattttttccaaatcaataatatcgctaaaaatatagcctaaactgaccgcacttatgttgatagtttttaaataattacgctggagatcatccaattcatcatcaagtaaaatttgactaagcccgacaatcccattcaatggcgtgcgaaattcatggcttattgtggcaagtaaggtacttttatcacggctatttttttctaacttttccaatgcttgggataattttttctgagcagcaattcgctcggcgacctcattttccaatcgattaaccgagctagaaagatcaagacgagaatgttcaagtttttctactaataaagtgaaaaaataaataacaaaaggcgcagtgagtaagccaaaagttacagaacgaaaaatatctacccaagatatctgatgaacaataaatagactaaataaaatctgagtacaaagggctaaaaccgcgagaatcatcacgcctaaaagagaaaaacgaagacgcccaagacgaataacccaatccacataactctgagcaaaatatttgaaatttttcatcaaatctcctaaaacattattatcgttataaaaaaacctgtgcatataggctttattatatccataaagtaaaagagattgttattactatgtgtgcgtaagaaatgaaaaacttaatctttattaattatctgtttgactaaaatttgtaattcaggaataacttgctcttcaaaccaaggattctttgttgcccaaagctgattacgtggggaagggtgcacgagaggcataaagtgcggtaagaattgacgataatttttaacagtgttagttacattatctttattttcgggtaaataatatttctgtgcatattgcccaataagaatagtgagctgaatattaggtagattccctaaaatcattggatgccatctttctgcaaaaccttgacgaggtggtaaatcacccgatttaccttttccaggataatagaaatccatgggaagaaccgcaaatatcccagaattataaaaataatcgtaatctactcccaaccattctcgcagacgatcaccgcttttatcattccaatacaaacgagattgctcagcttttaacccaggagcttgaccaacaatattaattcgagctgttttaggcgccgaaaataaagggaaaattccacgttctgtaaaatctttattttgaggatcagcgataatacttgaagttatttcgtctaaatttttaagcataatgaaggagattagaaatgaatatataaagtctatttgaaaaatatgaaaaatcaaaactctaaatgatgtaaataggtatatttattaaaactatattgtaggcaatacaaaactaaaaacttgatattgaaatacaatctctattttctactttaatccttttcatgaaataatgagtaaattcccaaaagctaaaaccccatatctttcgacacggggttcttctgtttttatttaacctagataagcatttgataacctggcggtgccctactctcacatggggatgccccacactaccatcggcattacagcgtttcacttctgagttcggtatggtctcaggtgggtccaccgcactatcgccgccaggataattctttgataactcgtcttttctcttttatctctcgtctcttttatctctcgttactcagtctttatctacctttcactcgttcttattggtcacaagctgaatccgattttctttctattaagtcttctatatttacttttctttgtttagtcttttacttcggtttccgctctacttttatttgcttcgcttttcatctcttacttcacttagctcccaaaaacacttgagcgttgtatagttaagcctctcgggcaattagtatctgttagctcaatgtatcactacacttacacaccagacctatctacgtcgtagtctacaacaacccttactatctcttagattgggagaactcatctcttggcaagtttcgtgcttagatgctttcagcacttatctcttccgcacttagctacccggcaatgcgtctggcgacacaaccggaacaccagtggtgcgtccactccggtcctctcgtactaggagcagccccaaccaattctcctacgcccacggcagatagggaccgaactgtctcacgacgttctaaacccagctcgcgtaccactttaaatggcgaacagccatacccttgggacctacttcagccccaggatgtgatgagccgacatcgaggtgccaaacaccgccgtcgatatgaactcttgggcggtatcagcctgttatccccggagtaccttttatccgttgagcgatggcccttccattcagaaccaccggatcactatgacctactttcgtacctgctcgacttgtctgtctcgcagttaagcttgcttataccattgcactaacctcacgatgtccgaccgtgattagcaaaccttcgtgctcctccgttacgctttgggaggagaccgccccagtcaaactacccaccagacactgtccgagaccgcgttccgcaatcttcgttagaacatcaaacgttaaagggtggtatttcaaggacgactccacaatcactggcgtgactgcttctnnnnncattccattcattaattaattaatgaatgaatgnnnnncttcattcacgcggcatggctgcgtcagggttccccccattgcgcaatattccccactgctgcctcccgtaggagtctggaccgtgtctcagttccagtgtggctggtcatcctctcagaccagctagagatcgcaggcttggtaggcctttaccccaccaactacctaatcccacttgggctcatcctatggcatgcggcctctcagtcccgcactttcatcttccgataatacgcggtattagcgacagtttcccgtcgttatccccctccataagccagattcccaagcattactcacccgtccgccactcgtcagcaagaaagcaagctttctcctgctaccgttcgacttgcatgtgttaagcctgccgccagcgttcaatctgagccatgatcaaactcttcaattcaagttcaatcgctcaataaactgcttagctatgaataaaaacactacttaaaaaagtaataatgaattttcagttaagcacctattaagacttcaaaattaaaaatagttttaaaacaagtcaatcaacaagtgcccacacagattgtctgatatattgttaaagaacaaaaaataacgacgcacttggaaacttaaaaaacttcacaacagtgcgtcgttgtgtgcggtgcattatagggattttcaaatcccttgcaagtactttttgcaaaaatatttaaaaaaatgatcttttgatggaaatataaacattttattaaaaagtgcggttagaatagtcaaacttttattgctattatttcttacgtaatgaaacttctccaccattaaacatctgaattttattgccacataatacttttaaataaccacgttcatctatgccttgttcaatacctgaaataacgccttgctcagtaagcacatttatttcactatttgaaaacgcattatatgattgccatgcctgttgaaattcctcatcaataccattttgttcaaagatatttaaacgtgtatataaatgttgtataagtttgggtaataaagtttgtcgctctacatcaggatcaatttcacacacttccgcataaggctgactaatttctgtttgttttgacaacgacacattaatacctacgccaatcactaaattgagcatgccatttttatgattagcaatttcaactaaaatgccacctaactttctttcatcaaacaaaatatcatttggccatttcacttgtacatttagcacttccgcaatcgccaaaccgatgactaaacttaacccctcaattgattttttaggatcaaacgtccaataaaaactaaacatgatttgcccagcaaaaggcgataaccattggcgaccacgccgaccgcgccctgcagtttgatattctgccacacaaagatctcctttttttaatgaaagaatattttgtagtatccattcatttgtagaggaaataatcggctgataatggatactataaggaaaaagtgcggttgaaatttgctgaggatttaataaaggaagcattggcactaagcgataatcttgtccatcaacgagaatatccaaaccaatttcacgtaattgttgaatatcttcctctagatttttagaaaatttttccaattcagaccgcacttttgtctgacaatccgctaaatatgtcaataacgtaaaattcatcattcattccttatggcaaatagtatgaaaatcatagcataaatcctaaaatttcgttttcaaaataaagtgaaatctgtataatctcgtcgcaatattttttaacttcaacttagcgagaatattgcaatgtcattacgcattaaacaagaagcccttacttttgacgatgttctactcgtcccagctcactcaactgtgcttccaaatactgccaacctttcaactcaacttaccaaagaaattcgcctaaatattccaatgctttcagcagcaatggataccgtaactgaaaccaaacttgcgatctctttagcacaagaaggcggtattggctttattcataaaaatatgacgatcgaacgccaagcagatcgtgttcgtaaagtaaaaaaattcgaaagtggtatcgtttctgaaccagtaactgttttaccaaatttaacgcttgccgaacttgctgaaatggtgaagaaaaacggatttgcgggctaccctgttgtagatggggaaaataacttaatcggtatcattactggccgtgatacacgtttcgtaaaagatttaagcaaaacagtttcacaagtaatgacgaaaaaagaagacttggtgaccgtaaaagaaggggcgagtcgcgaagaaattttggaattaatgcatcaacaccgtgttgaaaaagtattagtggttaatgatagtttcaaacttaaaggaatgattaccgttaaagacttccaaaaagcagaacaaaaaccaaatgcatgtaaagatgaattcggtcgtttacgtgtcggtgcggctgtaggtgcaggtgctggcaatgaagaacgtattgatgcattagtaaaagctggggtggatgtgttgttaatcgactcttcacacggtcactcagaaggcgtattacaacgcgttcgtgaaacgcgtgcaaaatatccaaatttgcctatcgttgcaggtaacgtagcgactgctgaaggtgctatcgcattagcagacgcaggcgcaagtgctgtaaaagtaggtattggcccaggttcaatttgtacaactcgtattgtaactggcgtaggtgttccacaaatcacggctatcgcagatgcagcagcagcattaaaagatcgtggcattccagttatcgcagacggcggtatccgcttctctggtgatattgcaaaagctatcgctgcaggcgcaagctgtgtaatggttggttctatgtttgcgggtactgaagaagctccaggtgaaatcgaactttatcaaggtcgtgcatttaaatcttaccgtggtatgggctcattaggtgccatggctaaaggctcttcagaccgttatttccaatcggataatgcggcagacaaactcgtaccagaaggtattgaagggcgtattccatacaaaggttacttaaaagaaatcatccaccaacaaatgggtggcttacgttcttgtatgggcttaacgggctgtgcaactattgatgaactacgcaccaaagcggaatttgttcgcattagcggtgcaggcattaaagaaagccacgttcacgatgttactattactaaagaagcaccgaactatcgtatggggtaatctttaaggtgggctttagcctgccttttgctgtttaaagtgcggttggtttttgcaaagttttaaataatatgaaccgcttacactatcaataataagagcattataaatgacaaatatccacaatcacaaaatcctgatcctcgactttggctcacaatatactcaactgattgcacgtcgtgtgcgtgaaatcggtgtgtactgtgaactttgggcttgggatgtaaccgaacaacaaatccgtgaatttgctccaacgggtatcattctttctggcagccctgaaagcacaactgaagaaaatagccctcgtgcaccggaatatgtatttaatgctggtgtaccagtattaggcgtttgctatggaatgcaaacgatggcgatgcaacttggcggtttaaccgaaacgtctgatcaccgagagttcggctatgcttcagtttctcttgaaaattccaccgcactttttgcaaatttaaacgataattcgaccgcttctgagccgaagttagacgtttggatgagccacggcgataaagtaacgcgcttaccagaaaacttcaaagtaactggcacaacgccaacctgcccaattgcggcaatgtcggacgaaaatcgtcgtttctacggcgtacaattccaccctgaagtaacacatactaaaaaaggtttagaattattaactaattttgtcgtgaatatctgtggttgcgaaactaaatggacagctgaaaacattatcgaagatgccgttgctcgtattaaagagcaagtaggcgatgatgaagtgattttaggcttatctggtggtgtggactcttctgtggttgcattacttttacaccgtgctatcggcaaaaacttacactgcgtatttgtggataacggtttactccgcttacacgaaggcgaccaagtcatggaaatgtttggcgataaattcggtttaaacatcactcgtgttgatgctgaaagtcgtttcttaggtgaacttgcaggcgtatctgatcctgaagcaaaacgtaaaattatcggtaaagtattcgttgatgtattcgatgatgaatcgaaaaaactcactaatgtgaaatggttagcacaaggtacgatctaccctgatgtcatcgaatctgcagccagcaaaacaggcaaagcccacgtcattaaatcacaccataacgtaggtggcttaccagactatatgaaacttggcttagttgaaccgttacgtgagttatttaaagatgaagtgcgtaaaatcggtttggcattaggcttaccagctgaaatgatcaaccgccacccattccctggcccaggcttaggcgtgcgagtattaggcgaagtgaaaaaagaatactgtgatttattacgccgtgcggatgcgatctttatcgaagaattacgcaacagcggttggtatgaaaaaaccagccaagcgttcagcgtattcttaccagtgaaatctgtaggcgtaatgggcgatggccgtaaatacgattgggttatttccctacgcgcggtagaaacaatcgattttatgaccgcacattgggcacatttgccttatgatttattaggcaaagtgtctaaccgtatcatcaacgaagtgaatggcatttcccgcgtcgtgtacgacatcagcggaaaaccacccgcaacaatcgagtgggaatagaaaatctctatttcagataatttctaattatttcagtaactttaataagtgcggttaattttcaccgcactttctttttgtttaaaagcccttctatgccaatcacaatgagacttaaccaaataggcacataagtaaaatagtcacttgtggttatttgattatctagcacaaagacagctattaaaaaaagcaatatgggttcaatataactcaacaccgcaaaaatactaactggaatttgttggcttgattttaagttggctgaaagcgaaatcgcactcacaataccaagtgctggtagcaataaccaataacgatattcttgcgtaaccaaagaaagcgtatcgctttgagaaagaatataaataaaacaaggaatcgaaattaaaataatatccaatgtaattccttgtagagcagggattttcatccatttacggcttagataataaaatggataaaccgtacaaacccacaagcttgtccacgaaaaactttgagtgtgccataattcatgtgcaacaccgcaggccgccagtaaaagcgcgattttctgaataaatgataagcgttcttttaaccaagcccatcctaaaatagccatgatcagagggaaaaggaaatatcccatcgcaatatttatcccttcgccatttagcggagcccacataaagagccagaattgacttcccgcatctaatgtccccagtaaaaataaaacccaacgcgtccaactttttcctaacgttgtcgtgataagagacaaaagagagcggcaaccaatagtcgggaataaaattaaaagtaacccaaagatcatggtcagcatacgccacgcaaaaacatccgttccgctaagtggttggagcccatatactaaataaatacaatatgccaaataaacattgtgaaaaaatgcacaataatacgccttgaatgactactttcatcttgaacctcatctcatcaatgtgattattataaaaccccaaggcaataaaaaatctcaactttatttttttattgtgataatatttttctcaatggttacatttttgagaaattatcttatgcaaacactggataaattagatcgtaatattttgaatgtattacaacaagatgccatgattccgttaaaagaactgtcagagaaagtgaatagttccgttgcaacctgtcaacgacgtgtgcaagcattaactgattcaggcgttattacaaaacgagttgcagttgtttccccaaaagccgttgggcgtacgattagcgtatttgtcatggtcgaaatggataatcaacattcttattatcaagagcaatttgaacggaaaatgcgtcaagaagacgaagtggtaagctgttacgaaatctcaggggactatgattttatgttgctactccatgcaaaagatatggaaagctatcacgcattcacacgccgagtattgacgggtgaatttcatgtaagaacttataaaagtttatttgtaatgaattttaccaaagcagatagtggaattatcttatagaacaagtgcggtaaatttttaccgcactttgtgtatgattaacttagttttgtcgtctgttttaagaataaataaccaagtattgccgaaacagttgatccaagtagaatacctaaacgagaaagcgtattgacactttcccccgcattagcatcaaatgcaaggcttgctaagaacattgacatcgtaaaaccgattccacataaaaccgcaacagcaaaaatttgtttaaaattaattccatctggtaatttagctaatcccaatttaacagaaatataactaaatccaaatataccgactggtttaccaataattaaaccgcttgctatagccaataataatggcgacgaaatcatattcacatctatgcctgcaaaactcacaccagcattggcaaatgcgaaaagtggtaaaataacgaaagatgaccaagaggataaaatatgctcgaaatcatctaatgggcgttctccttttttacctttcaatggaatgctaaaaccaataataacgcctgctaaagtagcatgcacaccagactttaatacggaagcccataaaattgcacctacgaccatataagcgcaaagtgcggaaactttgaaacgatttagtaatatcagcgcaataattgccacagcagaaaaaattagtgcttgtacactcaatccgtgcgagaaaaataatgcaataacaactatcgcaccgaggtcatcaataatagcaagggcaagtaaaaatattttcagtggaagtggtacttgtttactcaataacgccataattcccagtgcaaaagcaatgtctgttgccattggaattgcccagccattagctaaacttggatcttgtttagcgataaaccaataaactacagccggtataaccattccgccaatagctgcaatagcagggaaaatagcttgttgataggtagaaagcgcgccttcaaataattcttttttgacttccattcccactaatacaaaaaacaccgccataaaaccatcgttaatccagtgaattaaggttttattaattgagaaactaccaatttgtaaacttacaggcaaatttaaaaaatcattatattggttgcttaacggcgaattagccagcaacatcgcaacaacagctgaaaaaagcaataatataccgccagcagattctaatttaaaaaaacgttggatcagttttatcacataaacccctttaaaaatacatagcaaaaaattcacaaaggaagcatcctagcatattttcgaagttaaaggaaaaagtgcggtagattttgtcgagatttttagcgaattgtcgataaaatgccatatattgtgacaaaattcacatttttaagtttacgcaatagggattttatctactttgtagtagaatgcagaccttttatttttagaatcaaaaactatgttttcacgcaaagatattattattttaggaatgatgatcttcgccttatttttaggtgcgggtaatatcatttttccgcctatggaaggattttcctcaggacaacattggacgagtgcttccttaggctttgttttaactggcgttttaatgccatttattacgcttgttgtggtagcgattttaggtcgtggcgaagaacttactaaagatttaccaaaatgggctggcacaggtttcctcgttatactttatttaaccattggctctacctttgcaatgccccgcatcactaatgttgcttatgaaatggcgtggttgcctttaggcttaacagaaaataatgcgaatgttcgttttgtattctcactaatttttaacttaatcgcgatgggctttatgattagcccaaatacgatcatttcaagcgtgggtaaatttatgacaccagctttattagtgttacttattgctgtggcaattaccgtatttatttcgcctttatctgaaattcaagcgccaagtaatgcttatgaaaatagccattctttattaatcggtttaactagcggctatcaaaccatggatgtactcgcagccatcgctttcggtggaattgtcgcccgagcattatcagcgaaaaatgtgacaaaaaccaaagatattgtgaaatacaccatttcagcaggatttgtttcagtcatcttactcgccagtttatatttttcgcttttctatctaggtgcaaccagtgctgcagttgcagaaggggcaacgaatggtggacaaattttctctcgttatgtaaatgtcttattcggttcagctgggacttggattatggcgggtattattgtattagcgagcttaacaacacttgttggtgtaactagcgcatctgctgattattttgcaaaattttcctctcgcttttcctatccattttggatcgccctttttaccgcaatgacaatcactgtttcacaatatggtttaacggatctacttcgcataacgatcccagccttgttattaatttacccagtagctattgtgcttgttttattgcaattcctacgaaaaaaacttccatcaataaaatttacatacaatagtacattgctcgttacggtttgttttagtttatgtgacagcttaaataacgttaaaatgttaccagaaagcatcaattcattattgaaacacttccctctttcatctgaaggaatggcttggttggttccgactttagtaatgttagttgcaagcatttttattggaaaagcattgcgtaaaacccattcttaatctcacaaagtgttttatttatctttcaacactctcaatggttgcatatcactattgcctacaatcactcgactcgaatcagaacgtaggcaagtgccgtcataataccctcccacggtaaaagtacaaacttgcaagtattgctcttccacttgtggtaagcaccaaagttgttgataaatgttttcttgtttgccaaatttaccctttgtgacacctaaggtggcattattttcgccaataagtttaacattatctccccgacgacctgcaattggtttttgcgcatagccattttgaattaaatttagcgtgagatgaaaacttgcctctaacaaataacgatgattaaggaataaagaccaaagcacaggcaaaatcgccttaactgtatttttgtatagtaactttttgaattttagggaattaattgggcgaaatgaaattaagagggcttatttgttattttcctatcatatagagcaagatttagttcgtctataatatagggaaaattgaagaaaatccttgtgtctgcaacaaattaaattgaataagtgcatcataaggatttgttagcaaaatgtagtgattggttaacaaggaagctaacaaaaggagcttattctcactgtgaaattgttgtaagaaaagaagagtttttaactggtcatcattatgaagtagaagttatatatgactgttactcatcgtctattcgagacggcggtgtacgttgcaagcaaattgatgtttatgatagagaaaaatgggatttaattgagctagagggagttactgaagcacaaatcaaagcctattttgaccgcactttgggctgtaaatatgactggtggggcgcgttaggtatcgtactaggcatcaaacaaaaacgctcaaaatatttttgcagtgaatggtgttttaatgcgatttgcggtggggaaaatggttggcggtttagtccgaatcaactagcggctatatttaataaagagaaaagttaaaaggagagtttaccctgcacaaagtttaattcagtaaagaaaagacggcgataacaacggcactaggaatactcgttgttaccagctacgcagaataagcctgcatatagccatacgtcgcctaccttgcgcaaggctggcggattgtaacaaatcttttgattaggagaaatatatgcagtcaattaaagcaatccgttgcacattttgtaacaaattattggcaaaagtggggatagttggttatttagaaatcaaatgccctcgttgcaaaaccgttaatactacacgttaatttgatttgagtgtcagaatgccttgagcatcggaacgccatagaaaggaaaaactatggcaaatcaaaacacctttaaacaagccccattgccgtttatcggacaaaaacgaatgtttctaaacattttgaaacagttttaaatgagaatattaaaggtgatggcgaaggctggacgattattgatgtttttggtgggagcggcttattaagcaacacggcaaagcgtgtaaaacctaaatcaagagtgatttacaatgattttgacgggtattcagaaagactaaatcacataactgaaattaatcaattacgtgaaatactctatcaaactattaatgtaattataacaaaaaataaactcattagcaagcggttaaaagaataaattattaataaaatcaataattttagcggttataaagatgtaaattgcttatcttcatggctgctttttagcggtcagcaagtgaactctttagatgagctatttaagcagcgtttctataattgcattagaatagccgatggttatctgaatggcttagaagttattaatgagtcttttcatcaaatattacctaagtttatagataaagaaaaggtattattaatattagatccaccatatttgtgcacaagacaggaaagctacaaacaggcgagttattttgatttaattgacttcctacgattaattcacctcacaaagccaccctttatcttcttcagctcaacaaaatccgaatttattcgatttattgaggcgatggtggaagataaatgggataattggcaagtatttaatgaagtcaatcgaattacagttaatgcatcagcaagttataacggtaagtacgaggataatttaatttataaattttaaacgtggtttaaatacgatttaaagacaataaaaaaccgcttaaagtgagaaattgttacagattgattttcccattttaagcggttgcgtttctcaaatttcgcggtcggctacagtggggcagatcccaccttgtttattccaataatggaactttattttattaaaggtatctaagtagcaccctatatagggattaattaagaggatttaataatgaatttaactaaaattttaccagcatttgctgctgtagtcgtattatctgcttgtgcaaaggatgcacctgaaatgacaaaatcatctgcgcaaatagctgaaatgcaaacacttccaacaatcactgataaaacagttgtatattcctgcaataaacaaacggtgactgctgtgtatcaatttgaaaaccaagaaccagttgctgcaatggtaagtgtgggcgatggcattattgccaaagattttactcgtgataaatcacaaaatgactttacaagtttcgtttctggggattatgtttggaatgtagatagtggcttaacgttagataaatttgattctgttgtgcctgtcaatttaattcaaaaaggtaaatctagcgataatatcatcgtcaaaaattgtgatgtaaacgtaaaagcaactaaaaaagcaaatttataattaatcccaaatgaccagcataattgctggttattttatcttcctcgaggggagattttttcttgagatcattttcaattcaaactagacttacccctattttatttaacctaaattttgttatgcgtgtttcagactttaactttgatttacccgatgaattaattgctcgttatcctaaaactgatcgtgtttcttgtcgtttattacagttaaatggcgaaaacggagaaatttttcaccgcactttttctgatgtattagatttaattgatgaaggcgatttgttgatttttaataatacgcgcgttattcctgcaagaatgtttgggcgtaaagccagtggtggcaaaattgaagttttagttgagagaatgttagatgaacatcgtttcttagcgcatattcgttcatcaaaatcacccaaagaaggggcggaattatttttaggtgaagataaattaggcgaaaataatggcattaaagcagtaatgaaagctcgtcatagctcgttgtttgaagtggaattaagtgataaatcaaccgctcttttagatgtgttgcaaaccattgggcatatgccattaccgccttatatcgatcgtccagatgaagaagccgataaagaatgttatcaaacggtttatagtaaagtaccaggtgcggtagcagcaccaacagcaggcttacattttgatgatcccttgcttgagaaacttaaaaagaaaggtgtgaattttgaatttgttacattacatgtaggcgcaggaacattccagcctgttcgtgtggaaaatattgaagatcacgtaatgcatgcggagtatgtggaagtttctcaagaagtctgtaatgcgattatcgcaacaaaaaaagcgggcaaacgtgtaattgcagtgggaactacttctgttcgttctattgaaagtgcggcactttctgcggaagaatttggtaatccagatttaattgagccttatttttctgatacctctatttttatttatcctggtaaaaaattccgagtggtggattgtttaattactaatttccacttacctgaaagcactttgattatgttagtttcagcttttgctggttataaaaataccatgaatgcgtataagcatnnnnncattccattcattaattaattaatgaatgaatgnnnnnatagataaacatcaaatgttctttttctaattccaatatctgaaaatggatattagggatagaaaaagttcgcaatagacataaactcatctacaaatccatcaggtagttcactttctggtttgatagataatgttttatgatttttaggtcttgactctttaattaacgtaattagtttcgtcaatttttcaatatattcattagatacattaattactttagatagaaataatatgtattctgaaagcgttgttagtctattatattgatgactaagagatacggcagaataaatatcaataaattgagtcctacctttcattaacacacttttttttgtattgattacattctttcgcttttttacatttattctcatatgttggataagagattctaattggttttctgttaagagtgctttgttatgaattagatcgctaataacaagattattctgtttttcccaattcattacccactgtatagttcccagcttatttctaattgtgtttactgcggattgattacgtagttctacagttacccataaggttgaataaaaatcaggaataccagttttaacattaaccaatataggaaaacgttctccatttgaaaaaaggactgtttctaatctatgcataatcatttaatttacaaaaatatcatatataaatactatcaaattaaagatgttgtgtcaaaattaatgtaaaaaaaagagaagtcttattttataaggcttctctctggtttctatgatgtatttttacataatttatgtatatggatttcagaacggaatatcgtcatcaaatccatccattggtggttcagcctgtggtgcagcttgttgtggcgctggacgagatgattgataattaccaccattattagtttgacgagcttggtaagaaggttgtggtgaagatcccatctcattagagaaaccacctgcgttttgattacgtccaccaagcatttgcattacatcgccttgaatttctgtggtgtaacgatcttggccgttttgatcttgccatttacgcgtttttaaacgaccctccacatacacttgagagcctttgcgtaaatattcgccgcaaatctctgcttgacgacgatagaatacaatgcggtgccattctgttacttcacggcgttcgccagtattacgatcgttccagctttcactggttgctacgctgatatttgcaacggcatcgccgtttggcatagtacgaatttcaggatcattacctaaatgacctacaataatgactttattaattccagccataaaaaaacctcattttttatctaaaaaaagtgcggttattttgcctgaaattttttaaaagatctatatattttaactggatatttgcacagatattaaaatatgcgataatgatcgcaaaatttacatttatttcatacttttgagttattttatggaaaatatcgatattcgcggggctagaacccataacctgaaaaatattaatttaactattccacgcaataaacttgtggtgattactgggctttcaggttcgggaaaatcctctttagcctttgatacactttatgcggaagggcaacgccgctatgttgaatctctttcggcgtatgcacgtcaatttttgtctttaatggaaaagcctgatgtggattctattgagggactttcccctgcaatttccattgaacaaaaatctacctcacacaatccacgttctacagtgggaacaattacggaaatttacgattatttacgtttattgtttgcacgagtaggggagccacgttgtccagatcataatgttccattaacggcacaaacaattagtcaaatggtggataaagtattaagtttgccagaagacagcaagatgatgttacttgcgccagttgtcaaaaatcgaaaaggcgaacatctcaagattttagaaaatattgctgcgcaaggttatattcgtgcgcgtattgatggcgagatttgcgatttatctgatccgccaaaattagccttacagaaaaaacatactattgaagtagtggttgatcgttttaaagtgcggtcagatttagcaacacgtttagccgaatcttttgaaaccgcattagagctttcaggtggcactgcaattgtggcagatatggataatctgaaagcagaagaattaattttttcggcaaattttgcttgtccgcattgtggttattctgtgccagaattagagcctcgtttattttcctttaacaatcctgcaggtgcttgcccaacttgtgatggcttgggtgtgcagcaatattttgatgaagatcgtgtggtgcaaaatccaactatttctcttgctggcggtgcagtaaaaggttgggatcgtcgtaatttctattattatcaaatgcttacatcattggcgaaacattatgattttgatgttgaagccccttatgaatctttgccaaagaagattcaacacatcattatgcatggctcaggtaaagaggaaattgaattccaatatatgaatgatcgtggcgatgtggttattcgcaagcatccttttgaagggattttgaataatatggctcgccgatataaagaaacggaatcaatgtcggtgcgtgaagaattagcgaaaaatattagcaatcgaccttgtatagattgtggcggttctcgtttgcgacccgaagcacgtaatgtgtatattggaaaaaccaatttgccgataattgcggaaaaaagcattggcgaaaccctcgaattttttaccgcactttctttaacaggtcaaaaagcacaaattgcggaaaaaattcttaaagaaatccgcgagcgtttgcagtttttagtgaatgtaggtttgaattatctttctctttctcgttcagctgaaactctttcaggtggggaagcgcaacgtattcgccttgcgagtcaaattggtgcgggacttgttggcgtaatgtatgtattagatgaaccctctattggcttgcaccaacgtgataatgaacgcttacttaatacgttaattcatttgcgtaatcttggtaatacggtaattgttgtggagcacgatgaagacgcgattcgtgcagctgaccatattattgatattgggcctggtgcgggcgtgcatggcggacaagttattgcgcaaggaaatgccgatgaaattatgctcaatccaaattccatcacgggaaaatttttatcgggcgcagataaaatcgaaatcccgaaaaaacgcaccgcacttgataagaaaaaatggctcaaacttaaaggcgcatcaggtaataacttaaaaaatgtgaatttagatattcccgttggtttgtttacttgcgtaactggtgtgtctggttcaggaaaatccacacttattaatgatactttatttccacttgcgcaaaatgcgttaaatagagcggaaaagacggattacgcaccttatcaatctatcgagggattagaacatttcgataaagttattgatattaaccaaagcccgattggacgcacgccacgttcaaatccagccacttatacaggcttatttaccccgattcgcgagctttttgcaggtgtgccagaggcgcgtgcgcgcggctataatcctggacgttttagctttaacgtacgaggtggacgctgtgaagcctgtcagggcgatggtgtactcaaagttgaaatgcattttttacccgatgtttatgttccttgcgaccaatgtaaaggtaaacgctataatcgcgaaaccttagaaattcgttataaaggcaaaacgattcatcaagttttagatatgacggtggaagaagctcgcgagttttttgatgcgattccaatgattgcaagaaaattacaaaccttgatagatgtgggattatcctatattcgattaggtcaatcttccacaacactttcaggcggcgaagcccagcgcgtgaaactagcaacggaactttctaaacgtgatacgggtaaaactttgtatattctagatgaaccgacgactggtttgcattttgctgacattaagcaattacttgaagtactgcatcgattacgcgaccaaggaaatactatcgtcgtcattgaacacaatcttgatgtgattaaaaccgcagactggattgtcgatcttggcccagagggaggcagtggcggcggacaaattattgcgacgggtacaccagagcaagttgccaaagtagaaagttcccacaccgcccgcttccttaaaccgattttagaaaaaccttagaaaaaatgaccgcactttcagagaaaactcacataaagtgcggttattttattagtgatattgttttaattttagttatctgtataaattacatataatattaatccatcgcaagattagattacccactaagtattaagccaaaacctagaaattttggcttaattactatatagttttactgctttattttcttttgtgccttttagttcgtttttttagctgaaatcccttagaaaatcaccgcacttttattgttcaactatcgttcaatagtcgtttaaccacgtattttttaatacgaaaaattacttaattaaataaacattatgaaaaaaactgtatttcgtcttaattttttaaccgcttgtgtttcattagggatagtgtcgcaagcgtgggcaggtcatacttattttgggattgactaccaatattatcgtgattttgctgagaataaagggaagttttcagttggggctaaaaatattgaggtttataacaaagaagggcaattagttggcacatcaatgacaaaagcacctatgattgatttttccgtggtgtcgcgtaacggcgtggcggcattagtaggcgatcaatatatagtgagtgtggcacataacggtggatataatagcgttgattttggagcagaaggtccaaatcccgatcagcatcgttttacttatcaaattgtaaaaagaaataattatcaggcttgggagaaagagcatccttatgatggagattatcatatgcctcgtttacataaatttgtaactgaagctgaacctgtgggtatgacaacaaatatggatggaaaagtatatgctgatagagagaactatcctgagcgtgtacgtataggctcaggacgtcagtattggcgtacagataaagatgaagaaacgaatgtacatagttcatattatgtctcaggtgcatatcgttatcttactgcaggaaatacccatactcagagtggaaatggtaatggtacagtcaatcttagtggtaatgtagttagccctaatcattatggtccattaccaacgggtggttctaaaggcgatagcggttcgccaatgtttatttatgatgcgaagaagaaacaatggcttataaatgctgtattacaaactgggcatccttttttcggaagaggtaatgggtttcagttaatacgtgaagaatggttttataatgaagttcttgcggttgatgcccctagtgtttttcaacgctatattcccccaataaatggacattattcctttgtatcaaataatgatggtacaggtaaattaactttaactagacctagtaaagatggctctaaagcaaaatcagaagtaggaactgtgaagttatttaatccatcgttaaatcaaaccgctaaagaacgtgttaaagcagcagcaggctataatatttaccaaccaagaatggaatatggaaaaaatatttaccttggcgaccaaggaaaaggaactttaacaatcgaaaataatataaatcaaggtgctggtggattgtattttgaaggtgattttgtcgttaaaccaagtgataacaacgtaacttggcaaggtgcaggcatctctgttggagaagaaagtacagttgaatggcaagtgcataatccagaaggcgatcgcttatccaaaattgggctgggaaccttacttgttaatggtaaagggaaaaacttaggaagcctgagtgtcggtaacggtttggttgtgttagatcaacaagcagatgaatcaggtcaaaaacaagcctttaaagaagttgggatcgttagcgggagagcaacggttaaactgaatagcgaaaatcaagtggatccgaataacatttattttggtttccgtggtggtcgcttagatcttaatgggcattcattaacctttaaacgtatccaaaatacggacgagggggcgatgattgtgaaccataatacaactcaagtcgctaatattactattacaggttatgacaccataaatgataatttaaaacaattaactaataagcgagatattgcatttaacggttggtttggcgaaacagatgaaaataaacacaatggacgattaaaccttatttatcaacccactgcagaagatcgtactttgctactttcaggcggcacaaacttaaaaggcgatattacccaaacaaaaggtaaactatttttcagtggtagaccgacaccccacgcctacaatcatttagacaaacgttggtcagaaatggaaggtatcccacaaggcgaaattgtgtgggattacgattggatcaaccgcacatttaaagctgaaaacttccaaattaaaggcggaagtgcggtggtttctcgcaatgtttcttcaattgagggaaattggacagtcagcaataatgcaaatgccacatttggtgttgtgccaaatcagaaaaataccatttgcacgcgttcagattggacaggattaacgacttgtaaaacagtagatttgaacaataacgctgttattgcttctatacctataacacaaatcaatggctctattaatttaactgataatgcaacagcgaatattcatggtttagcaaaacttaatggcaatgtcactttaataaatcacagccaatttacattgagtaacaatgccacccaaataggcaatatcaaactttcaaatcacgcaaatgcaacggtaaataatgccactttaatgggcaatgtgaatttaacggattctgctcaattttatttaaaaaacagccatttttcgcaccaaattcagggcgacaaagacacaacagtgacgttggaaaatgcgacttggacaatgcctagcgatactacattgcagaatttaacgctaaataatagtactgttacgttaaattcagcttattcagctagctcaaataatgcaccacgtcaccgccgttcattagagacggaaacaacgccaacatcggcagaacatcgtttcaacacattgacagtaaatggtaaattgagggggaaaggcacattccaatttacttcatctttatttggctataaaagcgataaattaaaattatccaatgacgctgagggcgattacacattatctgttcgcaacacaggcaaagaacccgaagcccttgagcaattaactttggttgaaagcaaagataataaaccgttatcagacaaactcaaatttactttagaaaatgaccacgttgatgcaggagcattacgttatgaattagtgaagaataatggcgaattccgcttgcataacccaataaaagagcaggaattgcacaatgatttagtaagagcagagcaagcagaacgaacattagaagccaaacaagttgaacagactgctgaaacacaaacaagtcaggcaagagtgcggtcaagaagagcggtgttttctgataccccgtctgctcaaagcctgttaaacgcattagaagccaaacaagctctgactgctgaaaaacaaaaaagtaaggcaaaaacaaaaaaagcgcggtcaaaaagagcgttgttttttgataccccgcctgatcaaagacagttagacgtattaaaagccgcacttgaggttattaatgcccaaccgcaagtgggaaaagaacgtcaagctcaagagaaacaacgcaaacaaaaagaattgatcagccgttactcaaatagtgcgttatcggagttgtctgcgacagtaaatagtatgctttccgttcaagatgaattggatcgtctttttgtagatcaagcacaatctgccctgtggacaaatatcgcacaggataaaagacgctatgattctgatgcgttccgtgcttatcagcagaaaacgaacttgcgtcaaattggggtgcaaaaagccttagataatggacgaattggggcggttttctcgcatagccgttcagataatacctttgacgaacaggttaaaaatcacgcgacattaacgatgatgtcgggttttgcccaatatcaatggggcgatttacaatttggtgtaaacgtgggcgcgggaattagtgcgagtaaaatggctggagaacacagccgaaaaattcatcgaaaagcgataaattatggtgtgaatgcaagttatcagttccgtttagggcaattgggtattcagccttatttgggtgttaatcgatattttattgaacgtgaaaattatcaatctgaagaagtgaaagtgcaaacaccgagccttgcatttaatcgctataatgctggcattcgagttgattatacatttaccccgacagataatatcagcgttaagccttatttcttcgtcaattatgttgatgtttcaaacgctaacgtacaaaccactgtaaatcgcacgatgttgcaacaatcatttgggcgttattggcaaaaagaagtgggattaaaggcagaaattttacatttccaactttccgcttttatctcaaaatctcaaggttcacaactcggcaaacagcaaaatgtgggcgtgaaattggggtatcgttggtaaaaatcaacataattttatcgtttattgataaacaaggtggctgtatccaaccatttaaaatgagaaaaaaagagaaatagggatttggcgggaaaattcgggattaagtgggacggaaaccgcatgaacaggggcttgagagaatctagccccttttttattttaattactgtctacgccatacacgaacaccgttacattcaaaatcgacggctattctgaatttaatatctaaaccaagattgcgtttagcttgagagacgagaactgaaacattacgataaagtttagtcaagtctttagtctttgcccctgcaggcacaaagaaagattgtcctacttgcatctgctctaaaggatacgcaatagtttttttcgtgcgattacgtttaattttaggcataggcacatcatcttcaataacgaattgtgatgcatcttttgccattggcataggcgaactctcttggcttgtaacaatttcatgctcaatttgattagcaataatctgcttaccaagttcaagcgcaactacttcgacttgaataccattgacacgtgtatttactaaccctttttctttcaaggttacaaccgcaacattgctatgattagttgtaaaataaggcttttcgaaagttgcaacgtaatttataatttttttaaaatatcaaattctttttgtgttaacaagatagtcatttcgcacctctatatgtttaagttagtttattgttaaacaacataaatttctaaccgcactctttcaaaaatcaaattaatttaacaggtacttttacgactaattttttaattttttctgtttttccattcactacacagcaaggcttgtgcggttcataaggatagaatacagcgaacatttttggtttcattgtgacggtgaatttatcatcaatatctgcacaaagttgataatcatccgcttcgttgtaatcttcatacttagataaattcggataggttgcgcccacttcgatattttccgtgccacgaataagcacttgcacatctaagtattcatgatgtaattctgcttttttactgcttggttctgcagtttctggttccattacgttcatataaatttgatcgttaatatcatggcgaccattttctaacgcattcaaatctaacgtatttaaataatcacatacttcagcaatcacttttggtaaaccaactttaaaatttgggctggttaaactgctaataatcatagaattttccttatagtggataaaagttacgctatgataccaagtcggttaaatgaaataaagccaccgattacatcatctctcttgattaatccaattagctcttatagtgccgagtggaagagagcaaatattttgccaacttattgacgcataaagtctaaacaatgaaattacggcattaacacaagtattttcagaaaaaatattatcaagaggcttatgaggacctgtaaaatgaaaaataacaggagaaatatcaagactattaattgaaatcatatgaactaattgtaatgttgaatagcgtttagcaaaataaagttgaagatcattttgccacgattcagaaatatctcctgtatgtaaaataaaaacagagagattttcattgtgcattaataaagatttcagtgtaatttctacattaaggaagataattagcatcactagccatcattacattatatttcatataaaagaacctaatttcagagagaacaatcaatttttaggaggaaaatactgtcgaaacaatgataataagttggtaatgtgaaataaagttagccattaaagccaaacatcctgtataatgcacgggctttattttctacattagcgtgcggctatcaaaagaaatttttaaacgcccaaagtgcggtcattttttcgaaagatttcttttgctagtcgcaatctgggaaataaggcattgtttttaatataaattttaaggaaaacattgtgaatccaattgttaaacaatttaaatacggtcagcataccgttactctagaaactggcgcgattgcacgtcaagcaacggctgcggttatggtaagcatggacgataccacggtattcgtgactgttgttgctaaaaaagatgtgaaagaaggtcaagacttcttcccattaaccgtaaactatcaagagcgtacttatgcggcgggtaaaatccctggtggtttcttcaagcgtgaaggtcgtccatctgaaggcgaaactttaattgcacgtttaatcgaccgtccaattcgtccattattcccagaaggtttcttcaatgaaatccaagttgtggcaactgtggtttctgtaaacccacaaatcagcccagacttagtggcaatgatcggtgcttctgcagcattaaccttatctggtgtgcctttcaacggccctatcggtgcagcgcgtgttggttttatcgacaaccaattcgtattaaacccaactatggcagaacaaaaacaaagccgtttggacttagtggttgccggtactgacaaagccgtattaatggttgaatctgaagctgatattttaactgaagaacaaatgttagcggcagtcgtattcggtcatcaacaacaacaagttgtgattgaagcaatcaaagaatttgcaaaagaagcgggcaaaccacgttgggattgggttgcaccacaaccaaacacagatttaatcaacaaagtaaaagcgattgctgaagcacgtttaggcgatgcataccgcattactgaaaaacaattacgttacgaacaaatcgatgcgattaaagcggatgtaattgcgcaaatcacagctgaagatgaagaaatcagcgaaggtaaaatcgtggatattttcaccgcacttgaaagccaaatcgttcgtggccgtatcattgcaggcgaaccacgtattgatggtcgtaccgttgatactgttcgtgcattagatatttgcactggtgtattaccacgtactcacggttctgcaattttcacccgtggcgaaacgcaagcattagctgttgcaaccttaggtaccgaacgtgatgcacaaatcattgatgaattaacgggtgaacgtcaagatcacttcttattccattataatttccctccatattctgtaggcgaaacaggtatgatcggctcgccaaaacgtcgtgagatcggtcacggtcgtttagcaaaacgtggtgtagcggctgttatgccaagccttgcagaattcccgtatgttgtgcgtgtagtatctgaaatcactgaatctaacggttcttcttctatggcctctgtatgtggtgcatctttagcattaatggatgcaggtgttccaatcaaagctgcggttgcaggtatcgcaatgggtttagtgaaagaagaagagaaatttgtggtgctttcagatattttaggcgatgaagaccatttaggcgatatggactttaaagtagcgggtacacgcgaaggtgtcaccgcacttcaaatggacatcaaaattgaaggtatcacccctgaaattatgcaaattgcattaaaccaagcgaaaagtgcacgtatgcacattcttggtgtaatggaacaagcaatccctgctccacgtgcggatatttctgactacgcaccgcgcatctatacaatgaaaatcgatcctaagaaaatcaaagatgtgattggtaaaggtggtgcaacaatccgttcactaactgaagaaactggtacatcaattgatattgatgacgatggtacagtgaaaattgccgcagtagatagcaatgcagcgaaaaacgtaatgggacgtattgaggaaatcgttgcagaagttgaagctggcgcaatttacaaaggtaaagtcactcgtcttgctgattttggtgcattcgtcgcaatcgttggaaataaagaaggtttggttcatatttctcaaattgctgaagagcgtgtagaaaaagttagcgattaccttcaagtgggtcaagaagtaaacgtaaaagttgttgaaatcgatcgtcaaggtcgtattcgtttaacaatgaaagacttggctccaaaacaagaaactgaaattaaccaagaagatcctgtcgaagaacaggaataatcttggaatatagaatcaaaacttggtagcattcgctgccaagttttgttgttttccaacttttaggcataaagaaagcaaatgcggtgttttcgcttatctcgccattttatagtctatttatttagcttatgtgcgatcttactccttgctggctgtgttcagtctaggggcggttttgtgtctaaaaatcatgtcgtgttggctgaacaaaacccgaatactcactttgaacaagaagtgatgatcgtgcgattaagccaagtactactggttggaaaaatgagtaatgaagaacgtgcatcgctacattttgaacgtggcgtactctatgattctcttggattatggggacttgctcgttatgatcttactcaagcccttgcattacagccgaaaatggcatctgtgtacaattacttagggctttatttattgcttgaagaagattacgacggcgcattggatgctttcaatacggtgtttgaattagattcaggttatgactatacccaccttaatcgtggtttaaatttttattatgtagggcgctaccatcttgctcagcaagatttcttacagttctaccaagccgataaaaaagatccctatcgtgtcttatggctatatttgaacgaacaaaaattaaaaccacaagaagcccaaacaaaccttgttgaacgagcaaaagggctatcagaggacttctggggtacacacatcgttcaatattacttaggacacatctctgtagaagaattgcaacaacgtgcaagtgaatttgccgaaaattcacaacaatatgctgaaattctcacagaaacctatttttatctagcaaaacaaaaactcaatgtagggctagtagatgaagcagcagctttatttaaactagctatggcaaatcaggtttataactttgttgagtatcgttttgccgcgtttgaactcatgaaattaaaaccggttcaaacagaagacgaaaaagaagagaaaagtgcggtaacaaaagcgattgttttctaaaaatcaatccaaaacttaccgctctttgcagtagaacgaatagaaaaattcattcgctctgctcaacttaataaaccgaaagcccgttgagctttccttatttatattcgagtattttaatgactgacaaaattacttttaatgacttaggcttacctgagttcatcttaaaagctgtttctgacttaggttttgaaacaccttctccaattcaacaatcttgtattccgcatttgctcagtggcaatgatgtgctaggtatggcacaaacgggtagtggtaaaactgctgcctttgcactgcctttactcgcgcaaatcgatccaagtgaaaaacatccacaaatgttagtgatggcacctacacgcgaacttgctattcaagttgccgatgcgtgcgaacaatttgttaaatatgcacagggcactcgcattgttaccttatatggtggccaacgttatgacatccaacttcgtgcattaaaacaaggcgcacaagtgattgtgggtacaccaggccgtattcttgaccatattcgtcgcggaacattaaatctttctgaacttcgttttatcgtattagatgaagccgatgaaatgctacgtatgggtttcattgatgatgtagaaaccgtcatggcagaattaccagaaaatcatcaaactgcgttattctctgcaacaatgcctgaaccgatccgtcgtattacgaaacgttttatgaatgatccacaagaagtgaagatcaaagtgaataacgaaaatgccccagatatcgaccaaagttgttggtatgtacacggcgtgcgtaaaaacgaagctcttcttcgtttcttagaagtggaagattttgatgcagcgattatttttgctcgtactaaaactggcacgttagacattacagaactacttgaaaaaaatggtttccgttctgccgcacttaatggcgatatgacacaacaactccgcgaacaaaccctcgatcgcttacgtaacggcagtttagatattgttgtggcaaccgatgtggctgcacgcggtattgatattgaacgtatcagccttgtggtgaactacgacattccgcttgatgcagaatcttatgtacaccgaattggacgtactggtcgtgctggtcgttctggtcgtgctttattattcgttgagcctcgcgagcgtcgtttacttcgtaatattgaacacctaatgaaaaaaggtatcaatgaagtagaattgccaaatcatcttgtgttacaagaatgccgccgcaaaaaatttgtcgccaaaattacgaaacaactcgagcatcacgatttagagcaatatcgtagtttattagaagacttattcacagccgatcaggatcaagaagatattgctgcagcaatgttgatgctgcttcaaggtaaacaaaaattaattcttccacctgatccgccaatggagaaacgtcgtcgtgaacgtaatgaacgaggcgatcgccgtgaaaatccacgttcagctgaacgtcgtggcgaacgtaaaggctatggaaatccacaaccaatggatttatatcgtatcgaagtcggtcgtgcagatggtgtagaagttcgccatatcgttggtgcgattgctaacgaaggcgatattaacagccgttatattggccatattaaactttatgatgactacactaccgttgaattgccacaaggtatgccgaaagaattattgcaacaattcggaaaaacacgcgtattgaataaacaaatgcaaatgtctttcttaggtgcagtaaaatccgataattcccgtggcagcgatgattttaacggtaaacgtaaaggtcgtggtggcgatttccgtggagagcgcggacgtgaacgcggcaatgataatcgtggaaatcgtaaatttaatgaaaaaagtaaccgcacttttagcgacaaaccacgccgtgatcgtagatcatcattctaaaaataaatcgtctgatattttacatacacttagccccttgaacctcaagggggctttttattgtctatagtgaaatttgttgctaagtaatctatttttcttatcaaaataaagaaaaaataaccgcacttttttatgtaatttatatcattaaagtgcgatctttgttttacaataatcgtaaaatatagtgtgaaattttatagattaatcaatattttattctgattttatccctaagtttccaattttcacaccgactagaccaatcgagacgggatcaaaataatcccctaaaaatttgaacaattcatttaactctgtaaaagaacgctgcatttttatttgatcctccactttacgcacaaattcatagcgtatgttattttcttcaaaataagctgttagagttaaataaatcgtttcaaagaaatggctttttgccccctcctctccgggatcactaatacgcacattccacgtattattaagtagaatttgaggctgttttgacatattttactccttattattttaacctaagaaaaacccgattataaagtttctgtaatcaaaaaatttataatcgggcttttcaaatattttccctgggtgtttcgccttacgttggtaactacctttccctttacgttttttctcaacacgctgacgaaataatttatcgcctagcaatgccatcactgcattatcttttatcacgcctcgagtgtgcaaataaacggtttcattttcaaccgcacttttttgtttctttctcataaattttccttaaaaaagccgcggaaggatttccacggctggtgtattatatatgcaaacgtttaaattacaaaatctcaagtacagtttctggcggacgcccgattttagctttatcgccattaataacaattgggcgttcaataagtgctgaatgttcacttatcgctttaaataattctgcttgagaaagatctaaattatctaaatttaagcttttatatagttcatctttcgtgcgcatcatttggcgaacatcatcaattcccaattttttggcaatgctttgtaattcattaacggaatactgcttttgcaaatacagttcaataatcggctgaatacctttattttctaataatgctagcgtttcacggctttttgagcaatgtgggttgtgataaataataacagacataggatttcctcttagtagctataaacactataaattttaacttataatggcaaaaaatacttataggaaaagaaattatgctagaaatgttaaaaagctggtactcacgccgtttaagtgatccacaagcgatgggattattagctatattattatttggctttatctccatttatttttttggagatttaattgcacctttgttgattgctctagtgctatcctatttacttgaaataccaatcaattttttaaatcaatatttaaaatgcccaagaatgttagcgacaattcttattttcggtagttttattggtctagcagcagttttctttttggtattggtgccaatgttgtggaatcaaactatttccttattaagtgatttacccgctatgtttaataaatctaatgaatggctactcaatttacctaaaaattatcctgaacttattgattattcaatggttgattctattttcaattctgtgcgagaaaaaatccttggttttggcgaatctgctgtaaaactttctttagcctctattatgaacttggtttctttagggatttatgcctttttagtgccattaatgatgttttttatgttgaaggataaatcagaacttttacaaggcgttagccgtttcttaccgaaaaatagaaacttagctttcaaagtatggaaagaaatgcaacaacaaatttctaattacattcacggaaaattattagaaatactgattgtcactttaatcacttatattattttcttaattttcgggctaaattatccactcttattggcttttgcggtgggtctttcagttctcgtcccttatattggtgcagttattgtcacgattcctgttgcattggttgctttattccagtttggaatcagcccaacattttggtacatcattattgcttttgctgtaagccaacttttagatggaaatctccttgtgccttatttattttctgaagccgtcaatttacatccactaattattatcatttcagtattaatttttggcggtttatggggattttggggtgtattctttgccattcctttagccaccttagtaaaggccgtaataaatgccttacctcaagattaaataatctttgaattttaagtagtctattttaattagagctttatataaataaaaaatagttaatcgtaaattttcgattaactatttttttaatttattctaaaagtaaattaactaaggtaattcatcaatttctttatctactttaggtgggatcatatgttcacgacgtaaaccaacatcgtatgcaatggcgatggcaacaaaaattgaggaataagtaccaaatccaatacctacgagtaaagcaagtgaaaagttatgaatggaaggaccaccaaagaagaacaatgccatcacgacaactaatgtagtaaccgaagtaatgatagttcttgataaagtttgcgttaaagaaatatcaataatatcaatcgtatccaatcgtctaatttttcggaaattttcacgaacccggtcaaataccacaatactatcgttgatggagtaacccaccacagataaaatcgctgcgacaaaagtaagatcaatttcaatttgtaatgcagagaatacccctagcgtaataatgacgtcgtgcgcaagagaagcgatactgccaaagcctaaacgccattcaaaacgtgaccccacataaataagcaccattgctaatgtcgctaaagtcgcatataccgcaccttgtgctaattcttcaccaacatttgggccaacgaactcaatactgcgaatttgaatgtctttatctacattctgtagcatacttttgacgtgttcaccaatggtagaatcattattacttgcaggtaaacgaatcatcacatcctgaaccgatcctgtggtttgaacaactggactttcaattccattttcgtgaagtttactacgaatttgttcaaggttagcggactgcgagaagtgagtatcaaataccactccgccagtaaaatctaagccccagttaaatcctttggtaataataaaaaatagagaaattaccattaaaagtgcggataatatataaccccatttacgcactttcataaattcagtcaatgggaacgggagctttatcccattgatttcacggataaaatgtccgtctttatcttttgtaaaaagtttcatcatttcccgcctaaattaataattttttaagttgtttgccgccgtaaagggcattaactaatgcgcgagttccagtaatcgcggtaaacatagaaatcgcaacaccaagtgaaagcgtaatcgcaaaaccttgaattgggcctgttcctaccgcatatagaataattgcagttaagattgtggttaagtttgcatcaaaaatagaagtaaatgcgccgttataaccttcattaatggcttgctgaattgaacgaccattacgaatttcttctttaatacgttcaaaaatcaatacattcgcatctactgacatacctaaagttaaaacgatacccgcaatacccggcattgaaagtgtcgcgccgggtaaaatagacattaatcccacaagtaatacgatattaataacaagtgcaaaacttgcaatcacaccaaacattttgtagtaaaacaacataaaggcaataacagcaactaatccccaaagactcgcattaatcccttgctctacgttttgcgcacctaatgatgggccaattgtacgttcttcaacaatttgaattggtgcaattaatgcaccagatttcaataaggtagaaagattatgtgcttcggcaatactatcaacaccagtaatttggaaattagaaccaaaacgtccttgaattgttgcaacattaatgacttcttcatgcttttctaaaatagttttaccattttcatcttttttaccgttatctttatattcaacataaagcgttgccattggtttcttgtaatattttttagtggtctgagacataatctcgccaccttcgctatccaaggttacactcacttgcggcgtgcttgaatgctgatctaaaccagagcttgaattaataatatgctccccacctaatacggcacgtttaaatagcgcaacaggatgaccttggcgatcatatttaacttccgaatcagctggtaacatattacgagaaatagcatcagccgtaacattttgatttacgatacgaaactcaagtgttgccgttgcccctaaaatttcttttgcccgtgcagtgtcttgaacacctggtaattcaatcacaatacgctccgcaccttgacgttgaattaccgcttctgcaacacctaattcagcaacacgtttacgtaaaatcgttaagttttgctcaatggctaagtcgcgtgcttcatttaatgctgcagtagatagccctaaattaatactatcagcatcaggctcagtaatgtctaatgttggatgtaattggcgaataattcgctcagctttagcacgctggctcacattagctaaggttatcaacgtaccaaaatgctcagtatttttaatggcagtatattgaattttttctttacgaagttcgccacgcaaactatcttgtaattgctcttggcgttttacaagtgcggcattcatatcgacttccatcaaaaaacgaactccaccgcgtaagtctaatccccatttcataggattcgcaccaaacatacttaaccaagctggagtggctggagcaagatttaatgcggtggtgtaattattaccaagacgttcagcaattttatctttagcaagaagttgatcatcggtattagtaaaacgagctagaattgagccattctcaagcacgatagatttggttggaagattattagttttaagcacatcttgaacttgtccaagcacgctagtattcgcttcttgaccgcgtgtaccggaaatttgcaccgcaggatcttcaccataaatatttggaagagaatataaaatcccgatggccacaataaaaataaccatcaaattcttccataatggataacggtttaacatagttttccttttcttttctaacgcacagagccacaattcgtggctctggaaaataatttaacgttactcttaaagtgattttaatgaacctttaggaagaacgctcacaatgtagttacgattaatcgtaatttctgtcgtgtcgtttaacgcaatcacgatgctatcgctaccttcggttactttagtaattttgccgattaaaccaccagcggttaaaacttcagtaccttttgcaagctcagacatcaattttttatgttctttattgcgtttagcttgtgggcgataaatcataaagtagaaaattaaaccaaagatcacgaaaataaatagcgtggacattggactttgtgcttccattgtgttttccttattaatttaagttaaaaattttgcgtaaaataccataaattgcttcattgggaaaggcgaactaagcccaatatcctacgttatggcgattaattttattttttcaagataacgataaattctttttccgaagcgtaatattgctcgaccaaagcaacagaattttcttcggcaaaaatagaaaaattttccaccgcactttcaaggtttaagatcaacattagttcatcatttttattcaaattttttaaggcttttttagcacttaaaagaggaatggggcatcgaagtgcggttaaattgagctgatatttcattctttaacttgacgacgagcactcatgtgcttgcccatttcagtcaaaatatccgcacttaagcattcacgccccatttcaaataacggctcttctaacgcaatatgacgatcataaccttgaataaagcgttcaattaaatgtttatcaatattttgacgttgttcagaaataagctcttctaactgcacagataatgcattccaattttcatgcaaatattcgtgctgtttttctaattcatcaatggaagtttgtgtttgcggagccactttgactaattgagggaaaaaatctaattcttcatcatcgtgatgtaacggtgcggcacgattgaaatagcttaaaatctgcccaacatcatttaataccgcctgagtatagccgtgtttttctagataatcaggcaaaatgcttaactgacgacaaaaacgttttaccttgctatggcaggcataaagcatttcaataggttcattccaagtggcgaattgttgaggttcaagaatttgcataagatttcctttgttaaaaagtgcggtcaaaaaacgttttatttttctaccgcacttttattaattatgatttatccgctaattgtaatggcggaacaggtttgcccatgcgggcatagaattccaccacaaaatcatcaaaacgatcgtcttcaatagcctgacgaatttccgccattaaacgttgataatagcgtaaattgtgaatggtatttaagcgcgcacctaaaatttcaccgcatttatctaaatgatataaataagctttggtgtagtttttacaggtgtagcaatcacattcaggatctaacgggctggtatcatcacgatattttgcattacggattttgacaatgccgtctgtcacaaataaatggccattacgtgcgttacgggttggcattacgcagtcaaacatatcaatgccacgacgcacgccttccactaaatcttctggtttacccacgcccattaaataacgtggtttgtcagctgggatttgtgggcagatgtattctaaaatgcggtgcatatcttcttttggttcgcctaccgctaaaccgcccactgcataaccgtcaaaaccaatattgactaagccttctaatgatactttacgtaattcttcaaatacaccgccttggataataccgaataacgcatttttattgcctaattcatcaaagcgatcgcggctgcgttttgcccaacgaagtgacatttccatagattttttcgcataatcgaaagtcgctgggtaaggggtacattcatcgaaaatcatgacgatatcagaacccaaatcatattgaatttccatggatttttcaggcgaaaggaaaatacgctcaccattaattgggttttggaattttacgccttcttcggtaattttacgtaatttacccagactaaatacttggaaaccgccactgtcagtcaaaattggacgatgccattgcataaagtcgtgcaaatcgccgtgtttacgcataatttcttgtcctggacgtaaccataaatgaaaagtgttacccaaaagaatttctgcacctgtcgcacgcacttcttctggcgtcatgccttttaccgtgccataagtacccactggcataaatgcaggagtttctacactaaacgtaccttgtggacgtcaaacaccaagcgaccacgacgannnnncattccattcattaattaattaatgaatgaatgnnnnntattgctttctctttttggctatcatctttatgaagaaatcacgcacgaatggctcggcttggtcttttttgctttgattatctcacatctttcactgaatacatggtaggctcaaaaagaccttttcaggcagttataacagctatcgcattttgcaaagtgcggtcaattttgcaacttttttgttatttttaaccgcttgtatcagtggcattatgctttctaaacatctattggtggaaatgctattccactctaccacagatttaatgtgaaaaattcatatgaccagcacccattggttgcaaattttagtgggtgtacatttggggttacattggaaacctattgctaatttattcgcaaatggctagatagaaacgatcttatactcgccacaattttattaattaaggatagccaaatatgaagaaaattaatgttgccattgtggggagtgggtattctacccgtattttccacgttcccttttttaaaaatgatcatcggtttaacgtgataaaattttttgagcgttcaaccactcgggcattagcatggttccccaacattgatattgtgtcaaattttgaaaagttactgactgatgaggtggatttaatcgtgattagtcaataagtgtaaaaatggcataatcaactcaatgaatttatggacaaatattatctgtttggtattttatagtaagtacattgtgtaaaaataaaatctgaaatctagtctttttattctttatttttacatattcacacttcaattttgacaagttaatatttaattgattgattttaaagcattttataatttacattttataaatgatatagaaacaaggttattaaattacatagattgaaaggtaaatgataaaaatcagagagaagctgaataaaagagagcttctctttttattttactaattaaaaggactaaatctatgattatagatttagtccttaattttatagctttagttttagggaagattaattgctaccatttatcttccatatcacattttattgaagagtaaaactaatttgcacacttaaactcgaaggaaatcctgcgggtcttgttccaacagagcgagatacgttaatagcgtctaatgccgccttatctaaactttcatcgcctgaggattttgtaaccttagcaccacttaacgaaccatcagctcctacattaaaagatacactcacttttccttgtttgcgcattatcttcgctcgagttggataacgtttatggctttcaatttcacggcggattgcagaacggtaagccgctatttcactcgtatccgttccacttcctgctacctgtgcattgctattagctgcgcttgttgtacttgctttatcatttacgttggcacttgaatcaatattttcatcgccttttggtagctctttattgattggtttcttttgtggtttaacctcttttttaggtttattcttcggcttttcttttggtttttctttgggttttggcttttccttttctggttctttgatttttttcggttcaggttttattgttggatcttctacaatttcttgtttttctggttctggctctttttgtacatcttctggctctggagcaggttcttccaacaccatgccctgtaatagctccatagaaatacttgtagatatatcgccttgtgcgctatttgcactatcacttggctcattccaattccataagataaatcctataacaataccgtgtgcgatcaaagaaataagcaaacccaatagcgaacgttttgtttgctgcataattattccttacggcgtagttggtacagattgggaaggagtagattcttgagaatttttacccgcactttttcccttatctttcatagaaacaattgccacatttttgatttcatttttagaaagcatatctgtaatcgtcacaaaatcttggaaagaggcttcggcatcaatttttaaagttactttctgatctttattccattgagcaatttctgcctctagagcttcttgagaaataggtttatcattaaaatagagttgtttatccgctgtcactgtcaataatttagctagctcgtcagatttaaatgcgaccgctgtactagcttttggtacatttacttgaattttaccttgagagataaaagatgcagtaataagcaccacagtaagtagcaccaacataatatcaatgaaagggataatgttgatttcatcgaattttttcacgaattattccttatctttttgttcgcttaatactttccattttaaacgattaacttcaactttacgccccaaaccgttataaaacaccatagagggaatagccactagaatacctaatgctgttgcttttaatgctaaagataagtgcaacataattacacttggatcaatgtcgccaccgccgtgaccgatttgatagaaagttaataaaatcccgataactgtaccaagtaatccaacataaggcgcatttgcaccgatggtagaaatcactgtcatattacggtttaaatcaatatctaatgcgtgaatagtagaataatgtgccacgcttacctttcttaaaaaaagataacgttcaattaccatcgcaagcataataatgctcatcagtaataataaaccgatgataaaataatcactatactgttgtaaaaaatcaaaaagttgtaccattttttttccttgttatttgagaaatttttttgagaatataattgagaatgaatttcaatcactcggggaattctaacaaaggctgaataatgcgtaaaccttgaatttaaaaatttctgaattttttaccgcactttatgtggaaaagtgcggttattttttgaaatattatagggaacgaagataatcaatgatcatttgatgatggtcttttatcttaaatttatcaaatacttgcataatagttccgctttcattgattaaaaaactaattcgatgaataccgtcgtaagttctccccataaattttttttcgccccatacgccaaattgctccgcaacttgatgatcaggatcagaaagcaatgtgaaattaagttcttttttctcaataaattgagctaattttttcggggcatcaggactaataccaagtacaactaaacctagtacatctaattcggatttactgtcgcgcaatccgcaggcttgtgtggtacagcctggagtgagagcctttggataaaaataaattaaaacttttttaccacgaaaatcacttaaagaaacaaatttttcttgttgatttaataaggtaaaagcaggtgcttgattaccaacagataatggattcataaaaaactcctttaatgaaaaaaaatttgcaaattaaagttattttagcgactataacaagtgaaaccaaataataaaattaaaaaccgacggaggttatatgtcagcgcaaaattctttattttcgggtagcatagttgcccttgttacgccaatgaatcattatggcgaagtcgatttttcctgtttagaaaaattagtagaacaccacattgaagctggttctaatgcgcttgtttctgtgggtacaacgggagaatccgccacgctaagtattgaagaaaatgtaaaagtcattgaaaagactgttgaatttgccaaaggacgtattcctattattgcgggagcgggcgcaaatgcgacgagtgaagcaattacaatgaccaaattattacgagacagtggtgtagcaggatgtttatctgttgtgccttattataataaaccaacccaagagggaatgtatcaacattttaaagccattgcggaatgtactgatttaccacagattctttataacgttcctagtcgcacaggcagtgatatgaaaccagaaacagttgctcgtttagctgaaattgaaaatattgtaggcattaaggaagcaacgagagatgttagccgaatagttaaaattaagcagcttgcaggtaagaattttattgttttaagtggcgatgatgcaacaggcttagaagcaataaaattaggtgctgaaggagtaatatcagtaacaaataacattgcagcaaaagatatggctgatatgtgccgttatgcacttgcgggagattttgataaagcggaagaaattaatgctcgtttaatgcgtttacatcacgacctgttcattgaatctaatccaattccagtgaagtgggcagcttatcgcttaggcttaattaaatcgccacatttacgcttgccacttacaacacttagtgaagaaattcaaccaaaagtagaagatgtgctaaaaatcgcaggattgttataaaaataaaggggtaagtaattacccctcacttttatgtattatagatcagtaaaatgatcaaaaagtgcggtcagaatttatcaaattttcaatttagttaaggttaatatatgaaaaaaataatattgaatttagtaacggctattattctagctggttgttcgtctaatcctgaaaccttaaaagcaaccaacgattcatttcaaaaatctgagacgagcattccccatttttcccctttggctactggaggtgtacagttaccaaaagctgatgatgcctattcattacctaatattgaagtgaaaaaaggggaagatattgatattcgcccaccattaatccctctcgctattattcaaaattcaataacaaaatttgatggcgaacgttcgttgattgtctatccaaaacaacaggcaaaactatataatcttcagcaagttaagcgtttgttgaaagatgagggtatttcatcaacaacagatggttcgattttaacaactgattgggcaaaaacagaacgaattggcgataaatctatagaaataaaatatcaaatagaacaagttatgacagctgatgtaagtgcgcttaccgtatctattttacatatgcgccgagatggtattatttttacaccaaatgtatcagataaacaatattatacttcggaacgtttaaatcgcattgttttaacactcactaccgcgtataacaaacaattacaggatttataaagtactttaattcaatagggggcgtcatataataatttctctaaaataataaatgtttaaaaatgagacatagatcatccttttgaaaattactctgatatttatctttaaaacacttgaaaatctaaaataagaacactattttgttattaactagaatttaaatcacgcaacaaagaggtaaatgctatgacacttaatattaccagtaaacaaatggacatcactcctgcaattcgtgaacacttggaggaaagacttgcgaagttaggtaagtggcaaacgcagttaattagcccacattttgttttaaacaaagtacctaatggatttagtgtcgaagcctctattggcacacccttaggcaatttattagccagtgcaacttcagatgatatgtataaagcaattaatgaagtggaagaaaaattagaacgtcagcttaataaacttcaacataaaagtgaatctcgccgagctgatgaacgtttaaaagattcttttgaaaactaaatactgtagataaaatctaatctggcagtcttattgtaaaataatatgtctgtcagattaattttagatgaaacaattaaatcactaaaaattgatgatattaactcaaaatattaataaattttattaaatatagatcaatttaacctatcgtacacggcgatgtaaacttcagtacattcacgcttatccacatcaagaacataaacgacaactttatcttcaataacttcataaacttaaacaatgccctacagagcgaaattttattttataaaacacaccaaaaaatctaaaaaaccgctcggcaaatacgtatgaatttcctaagccttcgattaattttttcttaaattgcttttaataaaaatagagactaatgaaagatacagattaaatttatattttttaacgaaatagatattatttgacgggattaatggcggtgagaaagggatttgaacccttgatgcagtttcccacatacacgctttccaggcgtgctccttcaaccactcggacatctcaccgtaaaaggttcgcaaactataaagatttactctggtttagtcaagttttttactctaaaaaataaaaatctttaaaagattagttaaaaaataggcaataaaagctattgagctaattcagagttagaagatactaataatttagtaagatgtaaccttgataattattaaaacagttgatttttaataaataccatatattaatttatctcttattctctttcttaacctttttattttaattaaaaaagggattttctcaaaatgatcataccaagatgatggtatatcaataattttatccatttcttttaaaagtaaatttcctatatgacaatttaagtgactgcattttttgtgccaaaatttatttggaccacaataatgagaaataactattggcatttttacgtataataaatttttctttttaatcaaatctcgatccgttggtgtaaaattaaatctattattaataaattttacttttcctttacagataccatttagaatatcttgatcttggtatttcataacattattgtatttattcatccaatttattgatttttggaaaatattttcttctttccatttatttaaattaattaataatatgcccgcattaaaataaaaatctccttctaaaccaattgtttttttataagcttcattttttacatcaataaaagtatctcgacatgctgccaaataatagttcgttatatctatattccaaagttcttgaagtgaagagtttgttaatgtgtccacatcaatataaatagctttttctatattctttatgtatttagttaaatttagtctagcgtaagtagctaaagatatataatctattgtttttggaaagttttgaaaatctgactcacaaactggcaagaaaaatactttacaagaatattcgcttgctaaattatttattatggtcttattttcctgatttattttcatatcaagaatataaaaatttatttttttaggtgtatttttaataatgctaaaaatacttacagctaaataaggtgcataatagttgtcagacgaaaatataatattcattgtctgactgacagtccgtctgtctgtctgtctgtctgtctgtctgtctgtctgtctgtctgtctgtctgtctgtctgtctgtctgtctgtctgtctgtctgtctgtctgtctgtcatgaaattatctctgattaacgtgtgaattattattatttttagggttatttttttgatagattaaataattttattaactttataatttactttttaaaacactcaatgcctttgctcgatgagaaatttttttcttctcaaccgtttctaattcagcaaatgtgcaaccttgttctgggctaaagaataaactgtcataaccaaagccattttcgcctttttcttcaaaaccaatcacgccacaacactcgccttcggcgataattggcgatggatctgttggatgttgtaaaaacacgatacaactcacaaatttagcttggcgttgatcttgtgcaacatgagcaagctctgccaataatttctcacggtttttagcatcattgccctcttcaccagcataacgtgcagaatacagacctggtgcgccattaagtgcggaaaccaccaagcctgaatcatccgcaatagcaggtaaacctgatttttctgatgcataacgtgcttttaataacgcattttcgacaaaagttaagcctgtttcttctgggctttcaatgcctaaatctgtttgtgcaatcacttcaaaaccaaaatcagatagaacatcagccatttctttcactttgcctttattgcctgtagcaagtacgattttttgtttcataattagtccttttattgatgataagctgccgttaaatcagcccagttttgctcggtaaattgaatattcattcgtccaacttctttttcaaaggaacgttttaaacgattcagattttgtgctttccaaaaatcccctgattttttaccgcacttatcaaaatcaatcaaccaacatttttgctcttgttcagcttgttgaagcaaaatattgtgtgcattcaagtcagtatgacaaatctgtaaatcatgtagttttcgaatcaaacgaccaatttgcctccaagtttcttttggcaatgtttgtgtttgtaaaagtgcggttaaatcctgcgaattttcgattttctcggtcaaaatatccgcttgataacaaatacctaacttgcctttttgaatacgtgcggcaatgggtttaggcacaggcaaacctgcttcatacaaacgttgcaacaaatgaaactcagcaaaactacgggtagtgtcaagagcagaaaaacgataacgatctttgttcagtttaccccaaagtccacctcgataataatgacgcaacgcacaatttacgccaaaccaatcttccgtttgcaagaaataagtagtgcctcgaccttttgcacttcctatcactcgttcttgtttttgccaaaattccgcttggaaaaactcggttgcttgctcaaaagtgcggtcaaaattaaagataaaatattggttatcttgttggaattggtgcattggaacgttgttatgaatagaaaatgggcttattctactttaaaataggcacaaattaaatgataaaggaacgtcaatgccactttttaccgaagctccaaaatccctttgtattctccgattgtcagcggtaggcgatgtttgccacgccttagctgtggttcagcacattcaggcatattatccccaaacagaaatgacttggattgtaggaaaaaccgaaataggtttgctttcaggcattcctaatatcacgctcattccttatgataaaaaaacaggatggaaaggtgttttatcactttggaaacaactaaaaaataaacagtttgatgcgctattaaatatgcaaacagcatttcgtgcatcaatcctttctttaggaattaaagcaaaattcaaaattggatttggagaaaaacgttctcgcgaagggcaatggctatttgtaaatcgtcgcatcagagatcctttttcccctcacgtattagatggatttatggctttcgctgaatatattggcgtgccgaaagcagaaccgaaatgggaattagctatctcacaagatgattataaatttgccgatcaatttattgatttctctcgtaaaaatttattaatttccccttgttctagcaaagcagaaaaagattggctaatcgaaggttatgcagaggttgccaatattgcccatcagcataatatcaatgtaatcttctgcagttcgccagccaaacgtgaattagaaatagtcgaaaaaattaccgcactttgccatttcacaccaactaatattgcaggaaaaacaaacctaaaacagcttaccgctttaatttctaaggttgatttggtgctttcgccagattctggccctgcccatattgcgacaacacaaggaacaccagttattggcttatatgcctatcacaatcctttacggactgcaccttataagaatttagataacgtggtatctgtatatgaagaaaatgcccaaaaagaatttggcaaaccgtcttctgaactaccttgggcaaccaaactaaaaggaaaaaatttgatggcagagattcaagtcgaacccgtcattgaacaaatgaaaaaattgggattattttgaacaaataatctgtatctcaaaacttagatggttttaatatagccaacttgaaagttgtttttggaaagtaagaactttagtttttttaagttaaaaatcaatagcttgttaaaatagtttatatttagtcataaaaatctataccttaatctcttgcttatttagtccaatttttgcaggtacagattgaaatccaaaattagtttgaattttacgcaattaaatgcaaatgattataaataaaccaattgattattattgtaatcatcgttattattatcgccattctcctctttttaattattacaataaggaaaacagatgcgattttctaaactttcccttgcaattgcaacaaccttagtgacagcaaatgcgctagcgcaatccgttgaattagactctatcaacgttattgcgacacgagatccaagtaggtttgcttatacgccagaaaaacaatctaaagatagtcttctttccaagcaagccactagtgttgcagcagcgttagaagacattcccaatgttgatattagaggcggttcaagaagcattgctcaaaaacctaatattcgagggttaagtgataatcgtgttgtgcaagtcattgatggcgtgagacaaaattttgatttagcacatagaggttcttattttcttccaatgtcactcatccaagaaattgaagtaatcaaaggaccaagtagctccttatggggtagcggtgcattgggtggtgttgtggcaatgcgtacgccaaatgctttggacttattgaaaaataatgacaaattcggagttaaaattcgccaaggttatcaaactgctaataatttatcggaaagggatgtttctgtatttgcggcaaatgacaaattcgatgttcttattagtggtttctataataatgcggataatttacgcactggtaaaggcaataagctgaataataccgcctataaacagtttgggggcttagcaaaattcggttggcaaattaatgatgctaaccgcgtggaattatcccaccgcgaaactcgttttaaacaaacagcaccaagcaataatgaggtggaaaacgaacttaccaatgaacaaattacagatcaaatcagagagttccacaaaccaaacaacggttctccaccgaaagccaaaccatcacaagaagagttttactctggcgtgaaaacacgttttggtagtgtcagttatttaactgatcaacaaattcctgatcaaagcacggtatttaactattatttaacgccagataatccttatctaaatacgcatatcgcactgtataacaataaaactattgagaaagaacagcgtaaagtcagtggtgtgaaagatcagactaaattaactacccgaggtataaatttacgtaattcttccgaattatctcacatttcctttgtttatggggtggattatatgcgagataaaatccgtaccgaacgaggcacaaacaatactgatgcgaagtttcgagcggaaccctataatgcgaattcaaacactacaggcgtttatttaatcgctcatattccgctatttggggaaaaattgctaatttcgccaagtgtacgttatgaccactacgatacctcaagtaaaactgtaaaatacaaggataatcatttatctcctgccacaaaattaacttggatagtgaccaattggttagattttactgccaaatataatgaagctttccgagcaccatctatgcaagagcggtttgtgagtggtgctcactttggggcaaatcttattggagggctagatacaatcaatagatttgtagcaaatccaaatttgcgccctgaaacagcgaaaaataaagaaattaccgcaaatctacattttgatagtctgtttaaacaaggcgataaattcaaaattgaagcgacttatttccgtaatgatgtgaaagattttattaacttaaaaatatttaatgatgcaaatacaaataaaaatgcaagtgcaagtgcaaatggagcattgttgccattgccaacaaaatcccagtatcaaaacataactaatgcccgtttaagcggtattgaattgcaagctcaataccaaacagaacgtttaacactgtttactaactatggcagcaccaaaggtaaagataaagatagtggcgaagctttatcaaacattgccgcaagcaaaatcggcgtaggggtaaattatgctttagtaaaagacaaattcactgtgggagcgacagtaacccattacgctgctcaacgccgagtgcctaaagatcatggtgttacctacccaagttatatactgactgatcttcgtgctacctatgcaccattaaaaggcgaatggaaaaacctgcgtttagattttgcgctggaaaacttgtttgatagaaaatatcaacccgcgtttagtttaatggaaggcactggtcgtaatgcgaaaattagtgcagtttatagcttctaaatttactttggaaaacgccctaaagctgttttccctcaatttttgtaattttatcaattaataggacataaggaatgaaaatgagacctcgttattctgttattgcaagtgcggtcagtttaggctttgttttgagtaaatcagtgatggcattaggtcagccagatactggatcattaaaccgtgaactagaacaacgtcgaattcaatcagaagccaaacctagtggcgaattatttaatcaaacggcaaattcgccttatactgcacagtataaacaaggactgaaatttccacttacgcaagtacagattttagatcgaaacaatcaagaagtcgtcacagacgagcttgcacatattttaaaaaattatgtaggaaaagaggtatcgctgtcagatttaagtaatttggcaaatgagatcagcgaattttatcgtcataataattatttagtggcaaaagcaattttaccaccacaggaaattgagcaaggtacggtaaaaattttgttacttaaaggtaatgtaggcgaaatacgcttgcaaaatcacagcgcattaagcaataaatttgtatcccgtctctctaatacaacagtgaatacgtccgaatttattttgaaagatgagttagaaaaatttgctttaacaataaacgatgttccaggggtaaatgctggtttgcaactctccgcaggcaaaaaagtcggcgaagcgaatttactgattaagattaacgatgcaaaacgtttttctagttatgtttcagtagataaccaaggcaacaaatatacaggacgttaccgtttggctgcggggacaaaagtcagtaatttgaatggctggggcgatgaattgaaactggatttaatgagttctaatcaggctaatttaaaaaatgctcgtatagattattcctctttaattgatggttattctacgcgttttggtgtaacggctaactatctcgactacaaattaggtggtaattttaaatcattacaatctcaagggcattcccataccttaggggcttatttgttgcacccaacaatccgtacaccaaattttcgtttaagtactaaagtgagctttaatcatcaaaaccttacggataaacaacaagcggtttatgcgaaacaaaaacggaaaataaatagtttaactgcagggattgacggttcttggaatcttattaaagatgggacaacttatttttcattatctaccttgttcggtaatttagcgaatcaaactagtgaaaaaaaacataatgcagtagagaattttcaaccaaaatcgcattttacggtatataactaccgcttgtctcacgagcaaattttaccaaaatcttttgctttcaatattggtataaacggtcagtttgccgataaaacccttgaaagctcacagaaaatgttgcttggtggtttgtctggagtacgtggacatcaagctggtgcggcttctgtggatgaagggcatttgatacaaacagaattcaaacattatttaccagtcttttcccaaagtgtgctagttagttcattgttctatgactatggtttgggaaaatattataaaaatagccaatttctcgaacaaggcgtgaaaaatagcgtgaaattacaaagcgttggtgcaggactttctctttcagatgctggcagctatgccatcaatgtcagtgtcgccaaaccgcttgataacaatattaataatgccgataaacaccaattttggctttctatgattaaaactttctaaggaggtatgctatgtataaattaaatgtaatttctcttatcattttgaccacttgcagtggtgcggcatatgcctctacaccggattttccacaacatcacaaaactgtttttgggactgtcactattgagaaaactactgcagataaaatgacgattaagcaagggtccgataaagctcaaatagactggaagagttttgacatcggtcaaaagaaagaagtgaaatttgaacagcctaacgaacatgctgtggcatataaccgtgtaattggcggcaatgctagccaaatccaagggaaattgacggcaaacggtaaagtttatttagcaaaccctaatggggttattattacccaaggggcagaaattaatgtagctggtttacttgcaacaactaaagatttagagagaatcagtgaaaatagcaatagctatcaatttacccgtagaacaaaagaccgtcaggtgctaaaagaaggtctggtgctaaaagacggtcaggtggtaaaagaaggtcaagttatcaatgaagggaacattacggcacaagatttcgtggtacttaatggcgatgaagttatcaataaagggaacattaacgttgaaaaaaactctacaatcaatggcaaagtatatttatcctcaggctataattttacatttaccttaccagatagcggtataagtgtggcattagaagataatacagtacagggtattgttaaaaatgaagggagcattaaagcaggagagattacgttaagtgcaaaagggcgtaaacaagcattagatagcttggttatgaataatggtgtgttagaagcaactaaggttagtaataaaaacggcaaggttgtgttatctgctgacaatgttgagttgaataatgaaagtaatattaaaggggagatagttacttttggggctgatgttacctcaaataaggaacttaaagacaatataaaaatcacttctaaaactggctcaaaagttacctcgcctaaaatcaactttacaggcaaaagcgttaatatcaatggtaactttgggcgtgaagatagtacaacgcactataaagatgaatttaaaaaattaaatacagaagttaatattgacgtgccagacaatgaaaatattcgtattgcggatattgaagataatacgggcacgggtacgacgggtacgggtacgagttcatttatacaaacaggggcgttaagttcattactagctaataatggaaaagtgaatcttaaaggaaataacgttaatatttcaggacgtattcatatagattcctttagaggctcagattcgctattaaagctaactaacaaaggtcatattgatatcaataatgcggatattcactcaaaaggtcgtttattttttataaccagtttgcagaatgaggaagattttaaatcaaatattaccattactgacagcaaaataaatcttggtaacggagctatgggattggggcgtagtgtcgatgaaaaagactacgataaccgatggcagaaaacggaaggatcacaacgcaagaagtttgatgttaagatgagtaacgtagaatttaatcaggttgatgatgtgattttagcaggtggatttgaaaaagttaatttagataaaatcgttgccacaggacaaacgaatttttacattgatgggggggtatcccgtaatggaagaaaatatgaatacggtgtgttagatttagacaaacgtacgcagttatcggagttaaatcaaggcagacgccgttggggatattactatgatttagagttagatatgaatagagcctatttgtatcgttttgatctgtttgccactaaaaatacggggcgatcaactattaaaggacacagaaattaatatttctaacagtaatattaatctgaaaaatggatttgtacatttactggcagaaaaaattaaattagataatagcaagattgatattacctttgataaagataattcacaagatactttagctcaaacaaaccgtttaggaatgaatggtaaagtgtcaatgataaactcacatatcaaaatcgtgggcgatgagaaagagggtatatctccaactgggacttatgctacgatgtttttaatcggggaattaataggggaaaaaagttctatttttgtgaaatctcatcagggttacacctttaaaactgatggcaatacaaaaattgcaggtaaatacagcaaagaggacttgaaaattaccgcaattaacactggaggaagagcagcggaagaagttctaattaatggggcgttgggttcagctgataatgatgctaatatcgccaatatggcatttactattggtgattcagcgaataccaaaacaaccattgaaaatgccgacatcactgccttagcaccaaacggtgggacagcttatttaagctccaaagatgtagaaattgaggtaaaaccaaattcaaatttcacattctttgaacttcctcgtgagaaaaaccttaatcaaacaaaaattaacggtgcttctaccaaactcagtgaacgtggttttgctagactttatgacaaaattaacggtgtgcgagccagcaacttgtctgctgagcaattgaatgttacggacgcaagcgaaaaaatcattaatacaaagttagtgagtagcttagatgttgaaaaacttgtttctgttgcagtttgtgatgcaggtaacggttgcgaagaacaacaattcggcgataaaggtaataatactaaagtgagtgttggagagttagaagctgaacaataactattcagaacacaaggtaaaagcataaagccaatctgacagacatcaattaaattgcatgcctgtcagatttattaatagccactatcgctacattattttaaacaaccacgaacaatcaatacgccaacatttcgagcttgcgcgacggcttttggtttactcagtttaatttttaatccttgaagttgataacgtgactcaagcaaatccgccacttcataagccactcgctcaatcagcaagaaaggtttgctttccacataatcaataatcgcttggctcacttcagcataatttaaacaatatgcaacatcatccgtttctgccgcttgtttgcaatcccaagccatttctaaatcaaacacaagtttttgctttatttgctgttcccaatcatatacaccgatttgtgcaaaaacagtcaattcttcaataaaaacacgatccataaggtttcctctaaaattattgtaggcgtatgctatcaattttgggtagaataacgaacagtttttcttgctggagtgcaaaatgagccttttcgcccttttttatatgctttttgcctatcttttaggctcaatttccagtgcgattttaatttgtcgcattgcaggcttgccagatccacgtcaaaatggttcacacaatcctggggcgacaaatgtgttgcgcattggaaatcgtaagtctgccttggcggtgcttatttttgatatgttaaaagggatgattcctgtatgggctgggtattatttaggtttaacccaatttgaattaggaatggtcgcacttggtgcttgtttagggcatattttcccaattttctttcaatttaaaggtggcaaaggtgttgcaactgcctttggggcaatcgcaccgatttcttgggctgttgcaggttcaatgtttggtacgtggatctttgtttttcttgttagtggctattcttcattaagtgcggttatttctgcattacttgtgcctttttatgtgtggtggtttaaacctgaatttacttttcctgttgcactggtgtgttgcctattaatttatcgtcatcacgataacattcaacgcttatggcgtggtcaagaagataaagtttgggctaaatttaaaaagaaataaaaattttaccgcacttttctaaatttccactggagtttcctgtgtatactaaaggttccgtttccacccgtattgcgaaatatttatttatcattcttatcgttgctggtgtgattagttctctaagtttggcaattatgagcagtaataaatatgatgccgaagccattaatatttcaggttctttgcgtatgcaaagttatcgcttgctttatgaaatgcaagaacaaccagaaagcgtggaaacgaacttacgccgttatcatataagccttcattcatctgctttactagaagttcaaaatcaatttttcacaccgaatgtattaaaacattcctatcaaaacattttgcaacgttggacgaacatggaaaaatatgcgcgccaacaggatgtaaaaaactatagtaagcagcttactaactatgtggcagatgttgattattttgtgtttgaactacaacgttttagtgagcaaaaatggattttgggcgtatcggtgctttttttcgctatgttgttaattttagctatggtgtcttatgtgatttggtacacacagcgagaagttgtgaaacctttgcatttaatgacaaaagccagtatgcaagtgcaaatgcgtcaattcaatcatattccacttgacacaaggaaacaaaatgaacttggcacactggctcgcgtatttacacaaatgtccacagaactgggacagctttattcccgtttagaagaagctgtaaacgaaaaaacgcaaaagttgcgtcaaactaaccgcactttaagcactctttatcaaagtgctcaacttctgaatacaaacacaattaacgataaaattttaaatcaagttttgaattacatttttattagcaaccatttgaacttcgttaaagtggaagtgatgggggctgaacattgggatattacattgggtaagcaagatgctaataatgaactacaaatcgaaaccctttctgtggataacgaagaattaggtgtactgtcttggcaagcaggattaccttgtccagatcctcgaattatgcaaaatttagcacaaatgcttgctcgtgcgctttatttccataaaaatttacgtcagaaagaacagcttttattaatggaagaacgctcaattattgcgcgagagttgcacgattctttggctcaagtcttatcatttttacaaattcaacttactttgctcaaacataatctgaagaaagaagacgaacaatcaaaagaaaagagtttggcaattattgccaattttgaacaagccctttctggtggttatgcacagttacgtgagcttttagccactttccgtttaaccatacaagaagcgaatttacagcttgcactaaaacaagtgattgattcattacgctcgcaaacaacaatgcaaatgaatgtgaattgtcaattaccatcgcaaagtttgaaccctcaacagctggttcacgttctgcaaattgtacgtgaagccaccaccaatgcgatcaagcattctcaaggcacggtaattgaaattagcgcaagaattaatgcggaaggcgagtatgaaattttagttgaagatgatggggttggcattccaaatcttgaggagccagaagggcattacggcttgaatattatggcggaacgttgtcgtcagcttaatgcacaattgcatattcatcgccgagagcaaggcggcacacaagtcaaaattaccttgccacatacattatattaggacatcaaaatgcaaaatttacaaccttttcacactttccacattcagtctaatgctcgtgaaattattgaagcacatagtatcgaacagctacaacaagtgtgggcgcattctaaatcagaaaatttacccactctttttttaggtcaaggaagtaatgttctatttctagatgattttaatggcatcgtgatccttaatcgtttaatggggattacgcacgaacaagatgcaaattttcactatcttcacgtcaatggcggggaaaattggcataaattggtggagtggtctattaataatggtatttatggcttagaaaatctggctctgattcccggttgtgcaggctctgcccccattcaaaatatcggtgcttatggcgttgaatttaaagatgtatgtgattatgtggaggtacttaatttaaatacgaacgaaacctttagactcgacacagaacaatgtgaatttggttatcgtgagagtatttttaaacatcgttatcagcaaggttatgtgattacagcggttggattaaagctaaaaaaagattggcagcctattctaaaatatggttcgcttgtagagttcgatccgaaaacggtcaccgctaaacaaatttttgatgaagtctgtcatatccgtcaaagcaaattacctgacccaaatgaagtgggtaatgcgggcagtttctttaaaaatcccgttgtcagttcagaacattttgaagaaatcaaaaaacatcacgaaaatctaccgcactttccacaagctgatggctcagtgaaattagcggcaggctggctgattgatcaatgcaatcttaaaggttttcaaattggtggggctgcggttcataaaaaacaagcattagtattgattaacaaagataatgcaagtggacaagacgtgataaaacttgcatattatgtacgccaaagcgttgctgaaaaatttggtgtatatttacaacctgaagtacgatttatcagtgcaactggcgaagtaaatagtgagcaaattatcacgtaattttataataattgaactttcaattgataaaatctgtcttattaacaaattggttcaataagatagcttattgtgctataactaagtacattgattggcaaaagccaaaataaagaagggaaacgatggataaagaaacacaaatgatgttagttcctcaaggcagtatcgaaggttatattcgtgcagcaaatgaatatccgatgctgaccgcagaggaagaaaaggaattggcagaacgtttgtattatcacgaggatttagatgcagcgaaaaaactcattttgtcgcatcttcgtttcgtgatccacgtggcgcgtggctattctggctatggtttgccacaagctgacttaatccaagagggcaatatcggtttaatgaaagcggtcaaacgttttaaccctgaagttggtgtacgcttggtgtcattcgctgtgcattggattaaagcagagatccacgaatatgttcttcgtaactggcgtatcgtaaaagtcgcaacaacgaaagctcaacgtaaattatttttcaacctacgtaaaactaaacaacgtttaggttggttcaatgaaaatgaagttgatatggtcgcaaatgaattgggtgtttccaaagaagatgtgatcgaaatggagtctcgaatgagcggtgcggatgtcggttttgatttacctactgatgatgcagaaacagagacctattctccagccctttatttggaagataaaagttctaatttcgcagcagagctggaaaatgaaaactttgaaagccaagcaaccgagcaattaagtgcggcgctacaaagtctagatgcacgtagtcaggatattatcaaagctcgttggttagatgataacaaagccacattgcacgacttggcagcaaaatataatgtctctgcggaacgtattcgtcaattagaaactaatgcactgaaaaaattaaaaagtgcggtgaatttttaaataatttagaaaaagaaaacctgctgattagcaggttttttgaatctcacaccaaggcattctggattctgccctagcaactgcactcgcacaggcgtgccagaagaagtaaagccctgattttttaattcagggcataaacgataaaatactttttcagggagaagttgatcaactacgcgaacaaattctgttatacataaatcgtagtcattcacttcggtgagaagttcgcgtacaaagggatctagaaccccttgcataggcgcaagaataacacgcactatttccagccttttgctttacaaattaaatcgtaagcggcttgaatctgttgagttttttcttttgccatttccatcatttctggcggtaaacctttcgccacgagtttatctggatggtgttcattcattaaacgacgataagcacgcttaaccgtgttttgctcgtcggactcagtcacacccaatactttataggcatcatttaaagttgggccagaagcatgttggtaaccaccactattttgttgctgatattggtagccaccttgataggcaccttgttgatattgctgataaaaaccgccttgagtaaaagctcgagcagccatttccatcgcaatcatttgttcaaattgcatacgagaaagaccaagttcttcagcgatcacataaagcacttctttctcattttcgtgaagttctgaatcggcaaaagccgcttgaacttgcacttgtaagaacattcgcaataaatcagcacgttgcccacaaccaatgcgaaattcacggataacttgacgaatcgggaaatcagattctttaccacgacgaaacgcatcttgcgctaatttacgccctgcatcatccagtttaagctgaatcattaattgattagctaattggatatcttcttctgttacacgccctttcgatttgcttaaatgccctaacaccgcaaaggaggtttgcataaacaagtcttgacgcgttgttttctttttaaagaaactagaacttaccgagccaagttcatacaattttttatctgcaatagaacctaaaatgagcccagctatcgcaccaaaaaatccaccaactttccaacctaaaaatacgcctataatttttccaataaattccattctttcctctgttaagtcaaagtgcggttatttttataatgttatttataatgatgataaaaatttatttctcaagttttatacgccaaattcggcacgataagcacacatttctggcaaatggctactgtatcgaggatcttgttcgataaattgcatcaaatcatctaaatcaatgattgatagcacttggcattgataatcacgttctacttcttgaattgctgaaagctcgccttttcctcgttccttacggtttagagcgatcaataccgccgcaagttctgcctgatttgcactgattaattccatagattcacgaattgcagtgccagccgtaatcacgtcatccacaagcaaaatttttccttgcaatgggctaccaattaaattgccgccctctccgtgatctttcacttctttacgattaaaacacacgggtttatcaataccataacgattaaataacgccaccgaaactgacgtgccaattggaatacctttgtaagcagggccaaaaaccacatcaaaatctaccgcacttgcttgaattgccgcagcataaaactcgcctaaacgtgctaaatctgcccccgtattgaacaaacccgcattgaagaaatacggacttttacgccccgatttcaaagtaaactcgccgaatttcaatacatttcggcttaaagcaaattcgataaaatcgcgtttatattgttccattttttaactcctataaactgtgtttataagcctagcgctttgcgttgagcgataaaaatttgattacagccttgtttcgctaaatctaataatgttaataattcttcatggctaaatggctcgccttctgcagtgccttgcacctcaatcattcgaccatcttccatcatcacaacattcatatcggtttccgctgcagaatcttccacgtattccaaatcacaaacagcttgaccatcaacaatccctacagaaattgccgaaactagccctttaatggggttagtttttaacgtgccattctcaattaaaccgttgatcgcatcacataatgcgactgcagcaccagtaatggatgcagttcgtgtgcctccatccgcttgaataacatcgcaatctaaagtaatcgcacgttcacccagtgctttaagatccaccatggcacgcaaagagcgggcaattaagcgttgaatttccattgtgcgtccaccttgtttacctttagccgcctcacgttgcatacgactatgagttgaacgtggcaacattccgtattcagccgtgacccagccttgcccttgtccttttaagaaacgtggtacagcatcttccactgttgcagtacaaagcactttggtatcaccaaattcaacaagcacagaaccttcagcatgcttggtgtagttacgggtaattttaatttggcggggttgattattttctcgattatttggacgcataattattccttgatatggtttcgaacgatgtaataaaaaagcgcactattctagcacgctttagtttttatttttgttaaaattcgctaagatattgattattgataataaaaaagcaaggtgctttaccttgctttattaatttggtggagataatcgggatcgaaccgacgacctcttgaatgccattcaagcgctctcccaactgagctatatccccataaaagacagcaacatgataaaatttgactatgtggctgtcaatacgattttattatgcgtttgttatacggttaaatattaagcgttttgtgtatgaataaaatcaatagcacgctgaatacgcgcaagtacgcgatctctgccgataccgactagggtaacatccattgatggcgattgaccagaacctgtcacagcgacacgtaatggcatgccaactttacccatgcccacttctagttcagcagctgtttgctcaatggcttcgtgagtagaatgtaaatcccagctagaaagtgcggttaatttttctttcacttttgcaagcgcttcagcagcattgcctttgaaatgttttttcgctgcggcttcatcaaaggtttcaaactcttcaaagaagtagcggcttgagctagccatttcttttaaggttttgcaacgttccgcaagcatggtgactatttcagttaatgcaggaccattgcttgtatcaatgccttgatctttgtaatgccattcaaggtgtttagccacatattctggcggtaattcacggatataatgttgattcaaccattgtaatttttcggtattaaatgcgctagctgatttgctaacatgatctaattcgaaatagttgatcatttcttcgcgactgaaaatttcttggtcgccatgtccccagcctaaacgcacaagatagttaattaaagcttctggtaagtaaccatcatcacgatattgcatgacgctcactgcaccatgtcgtttagagagtttttgaccatcatcgccattaatcatagaaacgtgtgcataggttggaattggggcaccaatcgcttttaaaatgttaatttgacgaggcgtgttgttgatatgatcttcgccacgtacaacatgtgtgatacccatgtcccagtcatccacaactacgcagaagttataagttggagaaccgtctgtgcgacgaataataagatcatcaagctcactgttgctgatttcaatacggccacgtacggcatcatcaaatactaccgagccttcagttggatttttaaaacgtacaacatggggttcatcaggtgaatggttgtgatcgtgtaagcagtgacggtcataacgtggtttttctttattttgttcttgagtatgacgaagttcttctaagtgttctttagtacaataacaacgatatgctaagccttgttcaatcatttcatcgatcacttggttataacgatcaaagcgtttagtttggtaataagggccatgctcccacggaagatttagccattccatgccttcaataatggcagcagtggcttctggtgttgaacgctctaaatcagtgtcttcaattcgtaatacaaattcgccgttattatgttttgcgtataaccaagaataaagtgcggtacgtgcgccacctacatgtaaataacctgtagggctaggagcaaaacgagtacgcacttttacatttggatctaaattaaaaggagcatctagtttcatctttataacctatcttcaataaaatattagtcgttattctactacgacttgtttgacttctaaataaaaaagcggattttatgcttatttttacgacaattaaacaaaatttaataaaaaggtattgactgaaaatgcattctccctataatgccaacccacaacattaagggcgattagctcagttgggagagcacctcccttacaaggagggggtcactggttcgagaccggtatcgcccaccacttctctaaaaagtgttcttaatgttactaagtttgacctagcgggcgattagctcagttgggagagcacctcccttacaaggagggggtcactggttcgagaccggtatcgcccaccacttttctaaagtgtcctttccgctcaaactttccctttatatttaaacgctttctagtgggcgattagctcagttgggagagcacctcccttacaaggagggggtcactggttcgagaccggtatcgcccaccacttaaaagtttttaaataaaccgaaaatttaaggttttgccttaatattatcgggcgattagctcagttgggagagcacctcccttacaaggagggggtcactggttcgagaccggtatcgcccaccactttattttcaaattatccaaataattttcttttcccgttcaatccattacgtttacgtgataaagtgcgcaggcattgtcatatctaattttaaactgtttatatatcatagggaaaatttatgatcgcttatattttcttagctttattcacgattgcggcagtgatttttattgtaaactcccattatcgttggacttatttctttgctattacgctttttacttttttatttggcggcatgcttatggtttccagccaatggcaacgtgctttaaatttttcatcagtgctttttgtggtactgatgttatttcatcgtttaaaaattcattattacaaacagcctttgttaatttcagatttctttcttgtggtagattggcgaaattgggaaaccttaattcattataaaggtgcgttgtttggcgttattgggctactggcgttattaggttatgcgatttttggttttaatgatgtcgagtctttaggggtattaggtagcagcattggtgctttattgtttatcgttagctttagcttgatgtggcattattctaaaaatccaagtgcggtgcaagtttggttagattctttgcccgatgatggtcgtgatgtgtttttaaatttaccaatgtcttgccgcggtatttttttcaaagtgccaaattttgatggcaatagccaaaattttattgaaaaaatgaccgcactttcatttgatacaaacaacctatctgaaacaaaacccgatattgttgtaacattaatggaatccacgctgaaccctcatcaatttgcttttagtcagcaatctattccaccactttccatgtttgagtctcaaagtgatacagtatttgcttcgccgttgcgtgtacatacttttgctggtgcaacgtggaaatcagaatttgcttttttagctggtgtaccttcaaccgattttggcgcgttagcaagtggcgttttttattctgttgtaccgcacttgcaatcaggtttagtgaaaaatctaaaagctcaaggatatttttgtgttgccttgtcgccttttacaaaaggtaattacaatgcgaaatccgcttatgatcacttcggttttgatttgatgttacagccgcaagatcttggttatcctgcacctatcagtaaaaatctttgggatattagtagtgaagaaatgatgaagtacacccgaatgattttggaaaaacagcatcctgcattagaaaatgtagatcagccaatgtttgtttatgtattgactatgcgtgaacatggcccatacgaattgggcatagaaaatatatttaatcttcaaatgcctaatttaggggctaaaagtatttctgcattgaatgactatactcaacgtattgtcgcattgaatgattcgattgaaggaatgaataactatttacaagaacgtaaaaagccttttgtgctaggttatttcggtgatcaccaagtggcatttgataatgctatccctccgaagaaaggggattatgcacagcccgattatgtgacacaatttgttgtaagaagtaattgtgcgagtcaatttaagcaagaacaaaagtttttagatcttgcttttgctggaggcgtcttgatgaatgtagctggattatcagcagaagatgaatttatgaaagcgaatatggcaatgtgcaaattgagtgatggcaaattagaagattcttctgatattcagctactcaatgattatcgccattatttatatcaaacattggcgattgccagataattttcttatagatcgagcattattgctcgatctgctcgccaatttcatctaaggttgaagctaattgcgcaccaactaataccacaagccaacttatttgaatccacaataacataattggtaaagttgccattgcaccgtaaattaattgataagagggaaaagtgacgatataccaagtaaatgcttgtttaccaagagtgaaaaaaatcgcggcaagaaatgcaccgtaagctgaatgcttaattttcacttttttattcggtacaaccgtataaataagcgtaaaaataaaccaagtaaataaaaaaggcacaaaactgagcaattttaagcctaatgataaatgttccgattgctcaaacattattttaatatacgaactaatcccaatgctcacgccaataataagtgggccaagtgtcaaaatcatccaataaatcgcaaaagaagaaagcggagagcgagattgactattgtgccaaatactatttagtgttcggtcgatgttattaattagcatcaaggcaacggcaattaaactcacaattcccaccgcactcattttctttgagtttgatacaaattgatcgatatattcgcccaccatatcactcgctgacggcgcaaaattagtaaaaatcatttcttttaattctcccgtcacttcattgaatacaggaaaagcagagaaaatagaaaaaataaccataactaaaggaaccattgctaacattgtgctataagtcaatgcgccagcgacttgattaagtttattttctgaaaaacgtttccaaaataataatccaaaattttttaatgaaatcacagaaatcccccacaacaatgtttaaattttttaccagaaccacatacacaaggttgtttcattgtaggcaaagataccgttggatccacaaaataccaacgatcttcaattttcacaaaaattgaccgttcttgatgggcttgctcacattcttcgccttgaaaaatagctttaaattccaccgcactttgagtttttgtaaggctttccgtttttagaatttctaatcctagccacgtagtgttgtcagcccattcttgcaataacctaggctttaataaagtttgttggcttggcacagttgttacaacaatataaggtatattttttaacacataagctgtataacgtgaacgcataagttgttctgccgtttcgggaaatgcttgtctcaaatgaaatttgccacaacaatctgcgtaatgatgaccagattgacatggacaatcttccgaaagtgcggttgaaatttctgacatatttatccctgttgtttgaatttcgatatttgcgatcgaattgagcgtttaaaggcttcagctaatacttcaatctctaatgcggcatctaattcagcttcattttttggtgcagataacaagcgatttaaatgacgaattgttatttgcggataaggacgggcgagtaattttagttcatccttttgcttaattgttcctgtttcaataatacgaacataccatccactgagcccagtttgataaacaatatcgcgagtctcttcgttttccgtgttttttgataaacgctcacaaggtttacgtggttgagatacttctaaaatggttgagccgatttgataacgatcgccaatacatacattgtcttcattcaagcctgacacgacaaaattttctccgtatatcgcagtatccatataagaaaaatctttatttaataaagtatttaattcattaaaagaatctgccgacataaaaaagagagctttatctacaccaccgtgatgtttttttaaaccaacatcgtttccttccgcaccaagagaatgaatttttaccgatggcacaacttttttacgaatcgcactttcatactggcttccatcggaaaaggttagggtttgaacttgccccacttttataactaaaatttttgcattcattttatttttcgcttgttctagaaaaaatttacgtggaattataaccgaaaacgtttaactttttgaccgcacttctttttttacttattattcgttatcagaaaaacaaaaaagaaataatgaaaatgtttgaaagagaaaaaaattttctaaaaatattttatttcttttcttgaaaataagatttttcctaagggcgaaatcatcacgttcaatgataataaggagatttattatgtcagacgtatttcacttaaacctcactaaagcgcaacttaaaggtgcaacactcgctattgttcctggcgatcctgcccgcagtgagcgtattgcgaaacaacttgataatccagagtttcttacaagcacgcgtgaatttacatcgtggttaggttatatcaatggtcagcctattgttgtatgttctacgggtattggtggcccatcaacatcaatttgtgtggaagaacttgctcaacttggtgttcgcactttcttacgtattggcacaacgggtgcaattcaaccgcacattaatgtaggcgatgtccttatcacaaccgctgctgttcgcttagatggtgcaagccatcattttgtaccattagaatatccagctgtggcaaactttgaatgtacaaccgcactttataatgcagcgaaagcaaaaggtattgagccttatgtaggtgtaaccgtatcatctgatacattctatccaggtcaagaacgttacgatacttatagtggtaaagtatatcgtaattaccaaggtttgcttaaacaatggcaagatttgaatgtcatgaattacgaaatggaatcttcaacattgtttactatgtgtagtgcattaggtttgcgtgcaggaatggttgcaggcgtgattgtaaaccgcactcaacaagaaattccaaatgaagcaacgataaaacaaacagaagaaaaagctgtgtctgttgtgatcgcagctgcacaagcgttgttaagttaaattaatatttatttgaaacaataaaactttattttattctgcaccttaattagatttattttctaacgaagtaaggtgcagattttttattaacaaactgcgatcttctgatcaatttaatcaaagtagtctatttgctcgttggcattgaaacctaaacttgatataagttctaaataaactacttttaaaggctaaataacctaaaatatttacgactaaaattagatttctgttaaatctacatttttagtctcttttgaggctaataatgccaagaaagtcattaatgcattgattgctaaataaattcctacgcccattacaccgaatgacgcgttaatttttaaagaaatcattgctgcaattgttgcaccaataattgatgctaaattatacgcaagagaggcacctgaataacggacttctgttgggaataattctggtaatagcgcagccattggaccaaatgtcattcccataatcgccataccaatcactaaaaatgcaaatacgctaactggagtgccattttctaagaataacggcattgctaaaccaagcacgccgatagcaatagtcacccaaatcaaccatttacgacgaccgattttatcggcataaaaaccggaaatactgataaaaataccaaatacaatggcactaattaataacaagccagtaaatgtatttgctgggatacctaagccaagcgcataacctgcttcagaaagctttggtgctgttcgagaatatgcctgcgcaaaagccgtcataatgtaaaacagagaataagttgccaccataataaatgtaccaatgatcattggttttaagtgtttggtaaacacaacactcactggtgcattcaattttttgcctttttgctctgcttccacaaatacgtggctttcgtgcaaagttaagcgaacatataaaccaactgcaactaataaaatggaagatacaaatggaatacgccacgcccattcaacaagtgcattatgaccaagcaaatagctaactaagaagaacgttccattagcgacaaataaaccaattggtgcgcctaattgaggaaaagtaccgtaccaagctcgttttccttttggtgcattttctgttgcgactaacgctgcacctccccattctccaccaagtccaattccttgacctacgcgacatacacaaagcaaaatcggcgcccagataccaatttgagcataattaggaagtaaaccaattactaccgttgaaccacccattaaaacaagagaggcaaccaaggtttttttacgaccaattttatcgccaaagtgaccgaataatgccgaaccaatagggcgtgcaaaaaatgctaaagcaagcgtagaaagagaaagtaaatcattagaaagcggatcatcgctatgaaagaattgcgtattgaaaactaatacagcggcagccgcataaatataataatcaaaaaattcaattgctgtaccgaccatcgaggctaacgccactttcatcggattattacgaagttgtgtagacattgtgtttccttagtagtttattataaagagaaaggattaaatcctagcattttaactaagttctaacaatttttaatatgcaattttctatttttttagagaaatattttgaattttctaaatgtgagttatgcccagcgcagggaattgtcactaaatcaatttgattttctttggctaatacttggaacttatgatctctttcgccacaaaaataaaaaaatggcaaagaacttaaccgcactttttcactaaaatcaggttgtttggatagacttgtcgccagcaacattttgccaatattttccccacaatttgattttcgtttttcaaccaactgtaatctttcttctgtagtcaaatgggaaaacacaggttgttgataccaatcatttaatacatcttctggcgattcttgcataaaacgttgcgcccacgcaaaatccagctgaaaacgagcctgcttttcttcgtcagtttttaaacctagattcgctccttctaaaataacgccttgcaaattagatcgttccacctgagcttgcagcgcataatacaaagcaatcctgccacctagagaatacccaacaagaaaatagggttcatttttcaccgcacttttaatttgctgagccaaatactcagccgtttcttcaaaatttgtgacttcaaggtctttagcttgcccgtgaaaaggcaaatctagcgcaatacaattaaagtgcggtagattttcaatgactttttgccagtcattttttgtaccaagaagtccgtgaagaaaaatgatgtttatcattgaagggattattgatagaaataataaaatatggcggactaaagcccgcctacagaatacttaagcaccaatcacggcgtgactaatttgctcgattaagcgtttatacaaactgctaccatcactcggattcgttttaatttcaattaacgttgccttgcgacgactataagcctgtttcacaacagaattgagatctgcccaagtataaggatgagcgtatttaagatcgaacattgccgcgatttgagaaaaatcgccattatgcggtaatcgatagaactgatctttgacttgttcatccacaggtaacatatcaaaaatcgcgccaccattattattgatcacaaagattagcgttggttgcgtaacgtttttgaataatgcgaaagaattcaaatcatataaagtggacgtatcgccaatcaccgcaacaacaggtttatttgaaccaatacctattccagcagcagtagccaacaaaccatcaattccactcgcaccacgattggtataaacgggataactttctggtaattgcgttagcgcatcaactagacgaacaagtaaactattacctaaaaataaaacaccgttataaggtaaaagtgttggtaaacgtaatgcgagcgaggcttccgttaaatttccacctacttgctgttcaataaaggtcgcacagaacttagataaagctaacggctcaagcaaccaaggcttttggcgtaaaggtggatgtgcacgcaaccaatgatgcgctttagcattgaatcttgtcaatgaatgatggtaaggatctaatgctttaccgctttgttcaactagccaaaattcccctttaaacgcttgcaagaattgattaatgcgtttactaataaaacgcgcgccaaattgaatcacaatatcagcttgtagaagtttttcacgaacagtttggtttgctagccaaatatcttcataaggtgtcgttggaacaacaccagattgaatatccgtcagtaacacccagcccatagcacttgcccaagaattaatgcccatcgcttgttctgcaggtaattgaccaaccacaacgacaccacgtttggtacgccaatgatcccaattttcatgcattaatacttcgttttgttggacttctacatttatccaagacttgttttgaattaaccagcgttgtaacggatgtagccaactatgggaatttacttcctcatcagttgcatcataaagtggctcggcaaatgggacattaatatgaacaacgccaccttgttgtttttgttggaaagctgcctgttcaagtagagaaatcaaccattgtgcagaataatcagcgttcggtttaggtaaattaacatttgcaactggatactgaccaaacatattttgttgcaaaatagcttgatttgcaccgcactcccaaagttctggtggacgatcagcagttaaaacaaataaattcacaccagtttggcgtgcttcaataattgctggataaaggtttgctgttgcagtacctgatgtaacaataattgcaacaggcgattgagttgccttagcaatacccaaagcaaaaaaacctaaaccgcgttcatcaaaatgcgtatgacaagtgactgaacctgcattttgcaaacgtacggcttctagagttaaaggtgtcgaacgcgaacctggcgcgatacaaacgtgagaaacgccttggcgcaccaaggtttctaaaatcactttcgaccaacaacgattaaacacgcttaccgacattttttttctccgttatcatttttcttctgcaaacaaggaaattaaccctgctgctttacgttcaatttctttccattcttccaatggctgcgagcctgccacaatgcccgcgccagcaaatacacgaatacgatgaccttcaataaaagcagaacgaatcgccacacaaaactctgaacatacatcgctcatcacgcccaatgttcccgcataccagcctcgatcaaaggtttcgatttctgacaaaatcattttggcttgttgctgtggcaaaccagatactgcagccgtaggatgaatcgcttttaatatatttacatctgcataatgtgcggtcaaatttgcacgaattttacgaatcaaatgttgtactttacgtaacggtttcaattccacattgcttacatcaaaactttctacttgcttacgtaaattctgcgaaatatcttttacgactaaccaattttcttttaaatttttctcgtcatttaataaccaattggcttgagattgcgtttcttcctcactttcagaaactgatgctgtccccgccaaagcctctgttagcaacaaattatactcacgagcaaataggcgttctggcgtagaaccaacaaaaaccgaatgaaaattttcagcccataaaaaatgataacaaccttgattttgtttttcgctttctgctaaaaaatcgtacgcattaatcgcttgctttaaatgaaaagtggtttcattggctaacacaatttttgtcagctctccacttttaatttctaccaaagcctgattgacccaatcacaccaagttctttcattagctcgaggctctgtatgcaaaggaatttgttttggcaacgcagaaagtgcggtgagattttcaaaagttttgaggtgggctaaagtatcattcgcactttgctcatctttcacaaaaaaggataccaacgtgcctttattatcctgttcaacaagcattttgggtaatacaaattgtgcagtgccttgaaattgcaaaccgccgaccagtggaaaaccactttcttcaataaactcttgtgctaaatttaactgtgaaaatgactgcactgccccaagcgcagccagtgctttttcttcatcacgaaaatgtaaataaaattgaggatacgcagattgacctttcagccacgccaacaaatcgaccttgtccagttttacctgaaaacggacaagttcactcgttgattgctgtaaatatgcgtgaatttgcgattttaactcgcctattgcctgcgctaaataactcattagattttgttttaaatacacaaaaaattagccgtattctaccgcagattgttaatgacaaaaaatttttttacaaaatcttttcaatattaaaaattcagcgtaaattaaccgcacttttctcgaaaaatttattagaaacaaaaggatttcactatgcgattattcccaaaatccgacaaattagaacacgtatgttatgacattcgcggaccagtgcacaaagaagcactacgcttagaagaagaaggcaataaaattttaaaattaaatatcggcaaccccgcacctttcggctttgaagcaccagatgaaattttggtggacgtattgcgtaatttgccgtcagctcaaggctactgtgattcaaaaggtttatattctgctcgtaaagccattgttcaatattatcaatcaaaagggattcacggcgcgaccgtcaatgatgtgtatattggtaacggcgtatctgagcttatcacaatggccatgcaagcattactcaatgatggtgatgaagtactcgtgccaatgcctgattatccgctttggactgctgcggtaacactttctggcggcaaggctgttcattacctttgtgatgaagaagcaaattggttccccgctattgatgatattaaagcgaaagtgaatacgaaaactaaagcgattgtcatcatcaacccgaacaacccaacgggtgctgtgtatagcaaagaattattacaagaagttgtggaaatcgcgcgccaaaataatttgatcatctttgcagacgaaatctacgacaaaattttatatgatggcgcagtgcatcatcacattgccgcactagctcctgatttattaaccgttacattgaatgggttatcaaaagcttatcgagttgcaggcttccgtcaaggttggatgattttaaacggcccaaaacataatgcgaaaggttatattgaaggcttggatatgctggcatcaatgcgtttatgtgccaacgtaccaatgcaacatgcaattcaaactgcacttggtggctatcaaagtattaatgaatttattttaccaggtggtcgattacttgagcaacgaaacaaagcctacgatctcatcactcaaattccaggcattacttgcgtgaaaccaatgggggcgatgtatatgttcccgaaaattgatgtgaaaaaattcaatattcacagtgatgaaaaaatggtgctggatttactccgccaagaaaaagtactacttgtgcacggtaaaggatttaattggcattcacctgatcacttccgtgttgtcacccttccttatgtgaatcagcttgaagaagccattacaaaattagcaagatttttgtcggattaccgtcaataatgaatgctttgacaacattacaaaggggactaaatgtcccctttttatcgatataaatatattgcactttccttgcgtactattataatagtgcaaatttattttagaggcattttatgatacaacaaaaatctccttctctcttaggcggtgcaatgatcattgcaggtacagcgattggtgcaggcatgctggctaacccaacttcaacggcaggtgtatggtttatcggttcaattcttgctttaatttatacttggttttgtatgacaacctcaggattaatgatcctagaagctaatctacattatccaacaggttcaagttttgacactatcgttaaagatttattaggaaaaagttggaatattatcaacggtctttctgttgctttcgtcttgtatattttgacttatgcctacataacctcaggcggaggcattacacaaaatctgctcaaccaagcattcagttctgctgaaagtgcggtagatattgggcgaacttcaggatctttaattttctgccttattcttgcagcctttgtatggctttcaaccaaagcagtggatcgtttcacaaccgtgttaattgtcgggatggtggttgcttttttcctttctactactggtttattaagctctgtaaaaacagcagttttattcaataccgttgctgaaagtgagcaaacatatttaccttatttattgaccgcacttccagtttgtctcgtgtcgtttggtttccacggaaatgtcccgagtctcgtcaaatattacgatcgtgatggtcgtcgcgtgatgaaatcgatctttattggtacgggcttagcattagtgatttacatcttatggcagctcgctgtacaaggtaatttaccacgcactgaatttgcgccagtcattgaaaaaggcggcgatgtttctgcattattagaggctttacataaatatattgaagtggaatacctttccgtcgcattaaatttctttgcttatatggcaatttctacttcattcttaggcgtcactttagggttatttgactatattgcggatctatttaaatttgacgatagcttattgggcagaacaaaaacaacacttgttacttttttaccgccattattgctaagcctgcaatttccttatggatttgtgattgccattggttacgctggattggcggcaacaatttgggctgcaattgtccccgcacttcttgccaaagcaagccgtcaaaaattcccacaagcaagttataaagtatacggcggaaattttatgattggttttgtaatgttatttggcatattaaatattgtggcgcaaattggggcaaacttaggttggtttgcaagttttactgggtaagttttaaaaaataaatttaaattattaaatagcgatctgcactttaacagtgggttatgtagtccaactaattcgtgcagatcagcccttaattattttactttttattagttacaaacaattttaactgcaagtccgccttgagatgtttcgcgatacttggcgttcatatctttacctgtttcgtacattgtttcaatcactttatctaagcttactcttggattggtggtgcggcgtaaagccatacgcgatgcattgatcgctttaactgaagcaatcgcattgcgttcgatacaaggtacttgaacttgaccgccgacagggtcgcaagttaatcctaaattatgctccattgcaatttcagctgcgatgcatacttgtagtggattgccacccaaaatttcagctagtcccgcagcagccattgaacaggctacacccacttcgccttgacaacccacttctgcaccagaaatagaagcgttcatcttataaagtgaaccaatcatccctgcggctaataaatagcgttcaatgatttcaggtgttaatggcgagatgaatttttcgtagtaagctaataccgctggaataatcccgcacgcaccgttagttggtgccgtaaccacgcgcccgcccgctgcattttcttcattgacagcaagcgcaaacatattgacccagtcgattacgcgcattggatcgttagataaattcgtatttgcttgcaacgcacgataaagtgaagctgcacgacgtggtactcttaatgggccaggtaaaataccctctgtgtgaataccgtgttcaatacaagcctgcatcgttttccagacattctctagatgagcactaacagcctctttgccattcaatgcgatttcattttccaacatcacagtggaaagcattaagccgttatcactacaatgtttcaaaatatcttcggcatttttgtaaggataaggcacttggactgtgtttttttcttctttgccaaaatgggtttcatcgacaataaaaccacccccaatcgaataataggtttggcgataaagctctgtgcgattttcatcaagagcggtaattgtcatgccattttcgtgcaattttaaaaaagtgcggtggaaaatgagattattttcaaaatcaaattttactatcttttgaccgacattaatgggtaaaagcgcagtttgtttaactttctcgatgaaacctgaaatcatatcaatatccacattatgtggtaaataacccgctaaccccataataatggcaatatctgtactgtgtcctcgtcctgtcattgaaagagaaccgtacacatctacgtgaatttcagtagtttgttcaaattgatttcgtttaattaagtcgtctataaattgtttacccgctttcatcggaccgaccgtgtgggaactggatggcccaattcccactttaaacatatcaaatacgctaatcataaatttctcaaaattcgttaaaaattaaaagcgattataataatccataaacaactgcagaaatagcaattagtcccataattgttacaaatacattactgaaatgtccgctgtagcgtttcattgctgggattttgcgaatcgcatacattggcataatgaataaaatcatcgcaatgattgggccgccaagagattcaattaagcctaagatacttggattaataatcgcaacgccccataaggttaataagaagaaaagtgcggtcgcataattgagttttttacgatttacagattcgcctttcattttcaaatataagccttctaatccttcacgtgcccccatatagtgaccgaagaatgaacttgtaattgctaagaatgcaacaagcgggccaaaataagagatatatggattatcaaatttatttgctaagaaagacaagatactaatattctgttcttttgctgccactaattcttcaggtgttagtgttaatacacagctaaatacgaagaacattacgaagaataataaaatcgttgaagcgcctttttctgtatggctgatatggcgttctgcgccctcaaacgttttgtattcacggaattgtgagcaagtgaacgatgaagtcgctggcgaatggttaaatgaaaatactaatacgggaatggttagccataaagtggttaagaaaccacctgctgttggaaattcatataatacggcactattccattcaggaattaagtaaatagaaagaacaaataaaattaagactaacgggtaaacaagccattctgtgatttttaacatcactttttcattaaataacatcacggaaatcaataccgcaattaatacaaaagagagaataactcgatttggcgatgccataccaagttgatttacaatgaaagaatctacggtgttcgtgataccgttaccgtaaattaacagaatagggaaaattgcgaaaaaataaagtaaggtaataagtttaccagcggttttaccaaagtgttcttccactacttcagtaatatcgctgccaggctttttagatgaaagcacaaaataagctaagccacggtgagcaaaataagtcattggcccgacgataattgccattaaaactaacggccaaaatccacccatccctgcgttaatcggcaagaacaatacgcccgcgccaaccgccgtaccgaaaaggtttaacatccatgttgcatcaaatttgttccatttgagtttttctgttgatttcatagtttgctccaaagcataaattacttaaatttgtcaatttgtagagcgaaatatgccctaacaaaatttgagtattatgttatgccgataaatagagaatctcaaagagaaaawtctaaaattgtgatcaagttaaaatttttttataaaaagtgcggtaattttcagcgacaaaaaaatcggtgcgatgacgacaccgattgcgtataaaaataaatgaaattagaaccgcacttttttcaatcttaaggcgttcatcaatacggaaattgagctcaacgccatagcagcaccagcgattatagggctaagaaaaccgaaagctgcaaggggtatgccgagaatattgtaaatcaaagcaaaaaatagattttgtttgatatttttcaaggttgctattgcaataaaaagtgcatccacaagttgattcaccgaatgttgcataagcgttgcagaggcagtttgttctgcaatatctgaacctgatttcatcgcaaaactgacgtttgccgcggctaaagcaggcgcatcatttattccatcgcctaccattgcgacaatatgaccttgagctttcagcttttggatttgttccgccttatctctaggactgagtccaccaaaggctttcttaatgccgagctgttttgctatgtaatccaccacagattgttgatcgccactcataattacgacatcaatattttgctgttgtaagcgttgaatggcgtgcaagctatcgttttttaaagtatccgtcagtgcaaatgcaccgatgggttcatcatttatggatactgcgacaatgctcgcaatttgccaaatatcctctaaatttttaggcaagattaaaccgcaataatcaggtttaccgacttttattgttcccacttgttctaattcggcttgaatgccttgacccacttccatctttgaaaaaagtgcggtgggaatttctaacattttttgttctgctgcttgcacaatagcttttgcaattgggtggttagcttgtcgttcaactgctgctgcaaaacgatacaaatcgtcttcagaatacaccgcactttgtggctgccataaagcagagatttcaagctctccttttgttaatgtgccagttttatcaagtacaacggtatccacgtgggcggtttcctccattgcagccgcatctttaaaccatacgccagcattgactgctttacctaaaccaaccattatggctgctggtgtggctaatcccaaggcacaagggcaagcaatcacaagcacggataccgcgtgaattagtgaagacacactatcattcgtcagaatataagtgagtgcgaaagtaacaagtgaaatcactaaaacgacaggaacaaacacggaagcaactttgtcagcaaatcgagcaatgggtgcttttgaaccttgtgcatctgataatgcattcatcatatcgccaagtaaggtttggctaccaagctgatttgctcgatagataatagaaccttctgttaccatcgcccccgctaatacttttccacctttctgtttttcttctggacgagactcgcccgttaaatggctttcatcacaccatccatttccactttcaattatgccgtctgccgcaatacgttcgccttgattcgcacgaatgatttcgccgatattgaattggtcaagagcaatttcagtccatttttcattacgtaaaacagtgacttttttcggtgtcagctgcaagagcatactcaaactatttaggctgtgctttttagtgcgatcttcaagaaattttccaagactgacaaaaccaattaccattacagaagcttcaaaatacacatgccccattgcatgatcggcgtggtaaaacagcataaaagcagaataaagataaatagtgagcgttcctgtgctgacaaggacatccatattggcaagtccaccacgaatactaccgattgctccgcgataaaatggaatggctaaccaaagttgcacaatgcttgctaatgcaaattgccaaatcggcggtaacatcaagtgatgtgagccactcatcatgccaagcataccaatcagaaatggaatattgattatccaaagtacgattaatcgccaagggattgatgtatttttttctattggtaattcgttggtttgtttgatatgggcagagaaacctgttttatggataatctcgataatttgagtttcgcttgcttgcgtagcgtcaaatacaacttgtgcttcttcgacggcaaaattcactcccgcttgttgcacaaatggttttttatttaaaactttttcaatgcgattggcacaagattggcaggtcatcccaccaatctgaatcgaaatttttttactctgtggcgtcaaatccagcatcttcaatgacctcaatcagctgtgcaacattgattcgattttcatcaaaagtaatatttgctttaccctctaattgcacatcagcagattgtacaccatctaattcagttaaaacttgagtaagactttttacgcaacagccgcaatgtatgccttttatgtttaatgtgatagttttcatttttactccttgttagttgttttattggtgaatgcgattggcaggccatcccaccaatctgaattgaaattttttactctgtggcgtcaaatccagcatcttcaatgacctcaatcagctgtgcaacattgactcgattttcatcaaaagtaatatttactttaccctctaattgcacatcagcagattgtacaccatctaattcagttaaaacttgagtaagactttttacgcaacagccgcaatgtatgccttttatgtttaatgtgatagttttcatttttactccttgttagttgttttattggtgaatgcgattggcaggccatcccaccaatctgaattgaaattttttactctgtggcgtcaaatccagcatcttcaatgacctcaatcagctgtgcaacattgactcgattttcatcaaaagtaatatttactttaccctctaattgcacatcagcagattgtacaccatctaattcagttaaaacttgagtaagactttttacgcaacagccgcaatgtatgccttttatgtttaatgtgatagttttcatttttactccttgttagttgttttattgatgaatgcgattggcacaagattggcagttcatcccaccaatctgaatcgaaatttttttactctgtggcgtcaaatccagcatcttcaatgacctcaatcagctgtgcaacattgactcgattttcatcaaaagtaatatttgatttaccctctaattgcacatcagcagattgtacgccatctaattcagttaaaacttgagtaagactttttacgcaacagccgcaatgtatgccttttatgtttaatgtgatagttttcatttttactccttgttagttgttttattgatggttaaactataaacctttacataaggttaaggtcaagaagttttttatgaatattagtgaagccgcaaaattagtaggtttatccaccaaacaaatccgtgattatgaaaaaatagggttaattaaacccgctgttcgcagtttgtcaggctatcgaaattatggagaaagtgatttagaaaggttgcattttattcgacactcacgcaatgttgggttttcgttacatcaaatcgcacaattattagcactacaagataatcctaagcgtagctgccgagaagtgaaagtgctaactgctcaacatattgcgacattaaatcaacaaatagaacagttacaaaaaatggtacaaaaattgcagcactggcacgacagttgtcagggcaatgacaaccctgaatgtttaattttgaatggcttgaacggataagtgaaaagtgcggttaatattcccagctttctggatcgacacctaattcacgcataagcactttggcatcttcagggatttcatcattacgctctttcattaaatctgcatcggtgggtaaaggttgtcctgtgaatgcgtgtaagaatgcttcacaaagcaattcactgttagttgcgtgacgtaaactttttaattggcggcgagtgcgttcattcgtcaaaatttccagtactttaatgggaatagatactgtaattttttttacttgctcactttttttgccgtgttctgcataagggctgatatattttccatcccaattcgccataatttcccttaagtgcttattgataaccttacaaattgtccgtattctaattaaaaatcaaataaataacaatctagacggctaaacttccaaaataagttcttaaaaaaagtgcggtaattttttatattaaatgctaataaaagctagacagcgtagggttttagtggtaatttacgcgccattcaaagggtgcaagcccaccattcgaataatcaattcttattaattccaacatttattcattatgcatttaacagaacttaaaaatacgcctgtttctgatcttgtgaaactcggcgaggagcaaatgggcttagaaaatttagctcgtttgcgtaaacaagatattgtctttgcaatcttaaaacagcacgccaaaagtggcgaagatattttcggcggtggtgtgttagaaattttaccagatggttttggtttccttcgttctgccgacagttcctatcttgcaggccctgatgatatttatgtttccccaagtcaaattcgtcgttttaatcttcaaactggggataaaatcgaaggcaaaattcgtccaccaaaagaaggcgaacgctattttgcacttttaaaagttgatcaagtcaatgacgacaaaccagaagtgtcccgtagcaaaatcttatttgaaaacttaacgccattacatgctaactctcgtttaagaatggagagaggcaatggctcaacagaagatttaaccgcgcgtattttggatttagcatccccaattggtaaaggtcaacgtggtttgattgttgctccgccaaaagcaggtaaaaccatgttgctgcaaaacattgcgcaaagtatcacgcataattatcctgacgtggaacttatcgtattactgattgatgaacgcccagaagaagtgacagaaatgcaacgttcagtaaaaggcgaagtgattgcttctacttttgatgagccagcaactcgtcacgttcaagtggcagaaatggtaatcgaaaaagcgaaacgttcagtagagcataaaaaagatgtggtcattttacttgactctattacccgtttagcacgtgcttacaatacagtcactccagcttcaggtaaaattttatctggtggtgtggatgctaacgcattgcaccgtccaaaacgtttcttcggtgctgcgcgtaatgtggaagaaggcggtagtttaacgattattgccactgcgctagtagatacgggttcgaaaatggacgaagttattttcgaagaatttaaaggtacaggtaatatggaattacacctttctcgtaaaatcgcagaaagacgtgtattcccagccattgactttcaacgctctggtactcgtaaagaagacttactcacaacagcggatgaattacaaaaaatgtggattcttcgtaagattcttaatccaatggatgaagtggatgcaatggaattcttgattgataagctgatgatggcaaaaaccaacgaagagttttttgaagtgatgaaacgttcgtaaaagtaaccgcacttttatgaagaacaaggggaaaatattatgttttcccctttttttaataccagtaatatttgacgaaataaattatgacagctgataagttcataaaaggggcaaaaggtataaattcttttttctttttatgaataagcgaaaaacatattccaagaactgaggctaataataaaaagtgcggtaaggtttctaaatgaataaaacttcctaatgccattgctagccaataatctccccgtccaaaggcttcttttccgtaatagaattttgcaatccaatagattgcgtagaaaacaataaaaaaacttgccgcactttttatgctttcagataacgtaagcaatgaaaaattattgtctgctccaaataaaccgattgtaagtagccataaacagagagtagtagaaataagttgatagtgccaatcaagataactaattgcccaaaggataagaagtgtggctcctagccatacagtaaaaatagaatctttgaaggcaatttgtaaaaatataaatcctaccccaacacttaaaaaatacctcaaaatatgaccgcactttttttgttgaatagaggcaaagtgcggttgaaatggagaacggttttgtggaaataattcaatataagtcgcataaatctcttgctgtaaacgggtaataaaaccagataggtagaaccacaatgcgatccctaagatgccgcctaataaaaacattgtgaagtaaatcattgaataacagagcccatattaaagataggtaaatacattcccatcataataattccaatcagactgccgatgatcaccatcattaatggttctagcatttgtgagagtaagtcaatttgatgattaagtttttcttggtaattatccgcaatatgctccagcatcaaagcgagttttccgctttgctcgccaatttgtaacatttgttgtgcttccatcggaaaaagatcgctacttacactatcagaaaacgcatagccttgagaaacccattgtaaaattgaccgcacttctttatctaatatgatgtcatttacaagcgtcttggtttgccacgtttgtgtgcgagggagaaaactgtctagcgcttgattaagcggaatgccagcctgcaacataatttgtaaactttgactaaagttcactaaacgtgaaagtttttgaattgtgccaaaaataggcgtgatagaaataagttgatttttcttttgatgaaaccaagtctggcgttttagatagaagtaataaaatagaacaaaactcaaagcgaaaaatagcaaaatgccaatattttgcttaagaaaattggatatagagagcaatattgcggttattgttggtaattcggcattattgccactgtacatttcagcaaattgaggcacgataaaaagcagtaatgcgagtgtcaataatagagaaattcctaataccattgagggatataacataattttctgtaatttgcgttgtaaagccaaagattggctacgatgtgtggctatttttttacaaacaacggcaagttttcctgtcatttctcccacttgaatcagttgaatttcttgttgtgtgagatattttccttgttgttcaatagcttgtgagaatgctaagccagattcaatagattgaagcagccgttcaagccattcgttgagcataatttgagtacaattttgttgcaaaatttgcaggctgttttttaacggaattgcggactgtagcaatgtcgctaattgattgagtaattcactgatttctgaatttttggtttttgccccaaattgccagttttgttgtaatttgatgtgagtaagcccgtggcttattaactgaaagtgtgcttgttgtttcgtatccgcaataattgagcctttttgtttctgatttaatgcgttactaccttgataataaaagagttttttagtcataaagttttacctaacacacgttcaatttctttctcatctgttatgccttggctaactttttctaaaccactctctcgtaaattctcaaaatccgtttgatagccattctgttgccaatgtagaaattgatacacgccgattcgccctcgataaccttgatggcaatcacaagaatttattaaatttccaccgcactttggacagatttttcgtacaagacgctgtgcaatgacgagtagtaaactgttctcaatttcatactgctgaataccgagttgttgtaagcgagaaatggcagaaattgcatcattggtatgtaaagttgaaagcaccaaatgccctgtttgggcggcacgtaatgcaatccttgcactttcttcatcacgaatttcacctagcataatgatatcgggatcttgacgtaaaaaagcgcgcaatagacggctaaaatctaatccaatctgtggattaatttggctttgaataatgccatcaagctcaatttcaatgggatcttccgctgtcataatgtgtttatcaggtgtattaagccattgaagtgcagtgtaaagtgagatactttttccacttcctgttgggccagttactaaaattaatccttggggttggctaagagcgtgttgaaatgcttgttgctgattttcggtcatacccagttcagtaaagctaagttctacaggtttattttgttgcgctcgcaacacgattttttcgccccaatgggttggtaaggttgaaaggcgaaaatcaagaatatcggaaaaagtggttttaaattgaaatcgcccatcttgtggaagtcgattttcactaatatctaatttagccagtaattttaagcgtgaaataatacgattggcgaatattttgcttattaagggttgtggttgtaaaacaccatcaattctaaaccgcacttgaaactgatcagccaaggtttctaaatgaatatcagaggcatttttttgtaaggcagattcaaaaatctgattaagtaagcggataacaggttcatcatcttcttgttcaaaatgggtttcttgatgttgatagaatttaacttgctcttccacttgcatttggtgcggagtaagttgttgtaacagttctttgagttggctgctttctaacaaaattggttcgacaggttttcctgttataaacgcaatggtttcacaagctgaaagattggagagagaatcaacccctagccaaagacgattattttcttctttaagtggcaaagcaaaataccgcaagagcaaggattgctgttgttgattacgcgcccataaatcaggcgagatcgtaaagatctcgccattttgagcggttacacgctgagtatgaagtaaagcatagctcgtcattttttgacacttccgcaaaaatttgctggaaataaagagacatccgttcctttgcaagttgttgtccaagttacacctgctacagcattacctgtagcttgcaaaatatattccatatttgccaatgtgccatccccttttactgttattgcaccgttgcttgttgtcactgattttacatagccttttgctgtcgttatatctgctgcaattccattgcttcctcccgagcaactggaaggtttacctgtgctataaacgcataattccacatcagccttataaggtgctgacgcttgcagtaattcagataccgctgcttttttagtataattttgataagaaggaattgcgatagtggctaaaatagcaataattgcaatcacaatcattagctctattaatgtaaacccttttttcaaggtttgctgtgttgttagtttcattcattttccttttattagacctttgttagcaacgacattgtgaaaaggaaaaatttgtttgtaaaattgaccgcactttttctgcgagcctgatcgcaaaaaaaggaaaaaagtatgcaaaaactaaaagatattgaacaaggtatattggattgtcggcaaattcagtcacctcacttcgataaacgcccaaatccacaggatatttccttattggttattcattatattagtctgccgccagaacaatttggcggcggatatgtggatgatttttttcaaggaaaattagatcctaagattcatccttattttgcagaaatttatcaaatgcgtgtttcagcacattgtttgatcgaacgaaatgggcgaattacgcaatatgtcaattttaatgatcgcgcttggcacgcaggcgtatctaattttcaaggacgagaaaaatgtaatgattttgccattggaattgagctggaggggagtaatgaacagccttttaccgacgctcaatatttttcattgcaagagcttactaacgtaataatgaaaagttacccgaagattacgaaaaatcgaattgttggacattgcgatatttcgccagggcgtaagatcgatcctggtcaatattttgattgggaacgttatttatccagtgtaaaacaaactgtataaaaattaaacatcaaattttgatgtattctgtgtattataaatgcgttcactcttttaattctaactatttgaattaaaaggaataaatttaaatctgaaattttattaaaaaagttaatttgagttatacaacattatagattttctcaaccacaattttatccacagaaatattgaataactcaaagagatgataaaaagatcttttgtgaataaaactgttttaaaaattgtatttttttaccgcactttcttccatttttgaatgtgaaaagtgcggtttatttttgtttaagaccttttggttggaaacaaccctatttatttttaagtttgatgtgataaggatctttgcctgtttttacgagatcaattcacaatcagaaatccattattcacaatgttatccacaacatagatacttttcgtcatataaacaaaataagaatattttgttgtctagaatttttccctctccataaaaattgtgtatttttaaccgcactttagcttcaaacccaatgtgcggttatttttattgattttcctcttttcgctttttgcgattttttctaaaatgtgatactttttcgccgtcaataagacatcaaacacaaatcaatatgaacgacgaacagcaaaattcaaaccaatctgaaaatacgaaaaaaccttttttccaatctttattcggtcgcttttttcaaggcgaactaaaaaatcgtgaagaacttgtggaagtgattcgcgattcagaacaaaacgatttaattgatcaaaatacgcgtgaaatgattgaaggcgtgatggaaattgcggaacttcgtgttcgtgatattatgattcctcgttcacaaattatttttattgaagatcaacaagatttaaatacttgtttaaacacaattattgaatccgcacattctcgttttcctgtgattgccgatgccgatgaccgcgataatatcgtaggcattttgcacgcaaaagatttattaaaatttttacgtgaagatgccgaagcgtttgatttatcttcattattgcgccccgtcgtgattgtgccagaaagcaaaagagtggatcgtatgttaaaagatttccgttcagagcgtttccatatggccattgtggtggatgaatttggtgcagtgtcggggcttgttactattgaagatattttggaacaaattgttggcgatattgaagatgaatttgatgaagaagagattgcggatattcgtcagctttctcgtcatacttatgcagtgcgtgcgctcaccgatattgatgatttcaatgggcaatttaatacggattttgatgatgaagaagtagataccattggcggtctgattatgcagacttttggttatttaccaaaacgtggggaagaaattattttgaaaaatcttcaatttaaagtgacttctgcagatagtcgtcgattaattcaacttcgagtcacagtgccagatgaacatttggcagaaatgaataatgtagatgaaaaatctgaataggattttattatcaattaaatttatgaataaatatttaacttattttattgcttttatatcgggtttagtcggtgtttttgccttttcgccatttgattattggcctttagcctatgtgtctttactcggtttactttatgtcgctaaaaatcctaaaaaatccaccgcacttttatccactttcttgtgggcgatgggatttttctgctttggggtgagttggcttaatgttagtatccatcaatttggcggtgcgtctttaggggtaagttatttccttgtcggtttgcttgcgacttatcttgcattatatccgatgctctttacctatttagttcagcgtttcaaagtgcaaagtgcagtaatttttgccgtgatttggacattgacagaatttttacggggttggatttttactggttttccttggcttcagtttggttatacacaaattgacagcccattttatggtctcgccccaatttttggggtaacaggattgacgttctttaccctttgggcaagtgcggtcatttttaatctcgtttcctctttgtttaaaacgaaaaatcttaaattagttttagcgaatgctttgttattgattatcgtagggggattaagtgcttattcatcgcaaattcactttgtaaaatctgttgaagataaggcgatttcagtcacacttgcacaaggcaatattgaacaaaatcttaaatgggatcctaattatttctattctactttggcaatttatcaaaaattaatcgcagaaaatcttggtaaaaccgatttaattattttgcctgaatcagccttaccaacccttgaaaatgcaattacaccattttttgaaaaattagagcatgctgctaaagaaactaaaacggagattatgattggaacggtattccaagacacaaaatctggtaagttattaaattcaattatgactgctggaaacccagattttccttatcaaccagatacgccaaatcgttataataaacatcatctcgtgcctttcggggaatatgttccgctagaaagtattttgcgaccgcttaattcagtgtttaacttaccaatgtcagcatttcaaagtggggaggcagttcaaccctctttaatcgcaaaaaaacgtgctttttcgccagcaatttgttatgaaattattttcggcgagcaagtgcgacaaaatttgaaacaagatacggattatttgctcaccttatctaatgatgcgtggtttggcgattctattgggccttggcaacatttacagatggcaagaatgcgtgctttagaattaggcaaaccgcttattcgtgcaacaaatacggggatttcagtttttgttgatgcgcaaggtaaggtattagcacaagccccgcaatttattgaaacaactttgacttataaaattgcacctgcggaaggaaaaaccccttattctgtgttaggaaatatgcctttgtatgctttatctttattgtttttactcttgcacagtatgatggcgtttattcgtcgtaagatgaatatcttataaaaacaccagttaaaatgaccgcactttttcattcatataaataaacattatgcgcataccaagaatttatcatccaatatcccttgaaaatcaaactcaatgttatctttcagaagacgcggcaaatcacgttgctcgagtgttaagaatgacagaaggcgaacagcttgaactctttgatggttctaatcatatttatccagcaaaaattattgagtcaaataaaaagtccgtaaaagtagagattttagggcgtgagcttgcggataaagaatcccatttaaaaatccatttaggacaagtgatttctcgtggagaacgaatggaatttactattcaaaaatccgtagaattaggggtaaatgtgattacgccattatggtcagaacgctgtggcgtaaaacttgacgcagagcggatggataaaaaaatccaacaatggcaaaaaattgcgattgcagcttgtgagcaatgcggtcgtaatattgtgccagaaattcgtccattgatgaaattgcaagattggtgtgcagaaaatgatggcgcgttgaaattgaatttacatccacgcgcacactattctattaaaaccttaccgactattcctgctgagggtgttcgcttattaattggctcggaaggtggattatcagcacaagaaattgcccaaactgaacagcaaggatttactgaaattttattaggaaaacgtgttttgcgtactgaaactgcatcacttgcagcgataagtgcattgcaaatttgttttggggacttaggcgaatgatggaattacaaggaaaatttttgatcgcaatgccacatttagacgattattttaatcgcacggtggtgtttatgtgtgagcataatgaacagggttcaatgggtttggtaattaatcagccgacagatttaagcattgcggaactttattcaaaactcaattttatgatgaaaaatgaccgcacttttggtaatgaaatggtggttgcgggtgggcctgcgcatacagaaagagggtttattttacataagaatacgcttaatgcttttcaacatacttacaaagtcacaaaggaactttcaatgacaacctccgctgatgtggtggaaacgctaggttcaacttttgcacctgaaaaatatcttgttgcgctaggatgttcaagctggggggctggtcagttagaaaaagaaatcagagataatgcgtggttggtggtgtcatctaacgatcaaattttatttgatatgccctatgaagatcgttatgctgcagccaatcagttacttggtattcatccttataattttgcgttagcgcaagtggggcatagttaatgggaattaccgctctggcttttgattttggcactaaaagtatcggttgtgccataggacaaagtattactggcacagcacaagccttgcccgcttttaaggcacaagatggcatcccaaattgggaagcgatcgaaaaatgtttgaaagaatggaaaccagatgttgtcattgttggtcttcctttaaatatggacggaacagaacaagatctcactctacgtgctcgtaaatttgcaaatcgtttacaaggtcgttttggcgttaatgttcatttacaagatgaacgattaaccaccacgcaagctcgtagtgagatttttgaacgtggtggttttaaagcattaaaaaaaggcaaaatcgatggggtgtcagcttgtttaattttagagagctggtttgaatacgctgaatattagattcacattgtaaaaataaacttcattttagaatgattaaagcgcgattttataatctcgctttttcgccaccaaattcatctaataaattttcggtgagtttggctaaaatacctgtcatcagtacaaaatctgcatcgaaacgctgtgcaaaatcttctttcagaatatcatcatttttttcccgtacagtatctgcaaattttaaacgtttgattgtgcaatcttcgttaaaaacgaaagttaaggtatcctcccattctaaggctaatttacttactacttttttgccatcttgcagaagagcgagaatttcttcattttctaagggttgttttttacaacgaataacgctgtcttcctgactgccacgaagctcggcttcttctaatgcaagtaaccaatgcggtaagctatcttgaaggatccaattggttaaaatcgtgctgggttcattagcaaaggctaaaggcacgacagggagcgaacctaaggatttacgcagtaatgcgagcgcatcttctgcgcgtttactcgatgcggcatcaacatgaacaagattattttccgtatcaatccatagtgccgtatgctgatttttactaaatgcacgaggtaataaattcatcacgacatcatcttttaatgtctgtttttctacctttttaagtttgcgattttctttttgttcaaggctttcaatgcgttcatcaagttcacgtttgaccacatttgccggcaagattttttcttcttttttggcgattaatagaatttgttttcctacagaaaaatagagtaaatcagcacctcttaatggagctgaccagccaaatttactttgatcttgagcaccgcaaggatggaattgacaatcttccagttgagtttgtagttgtgtaagatcccaatctagcggtttagtcagtctataagtcattaaatttttgaaccacatcgtaacacttccttcaatatagggtagaatgtgcggtattatagcccataaaagtaggaaaaacgatgcaacacaaattgattgcctttattggtggcggcaatatggcacaagctattattcttggattattgaaacaaggttatcctgccgagcaaattattgtgaatgatccgaatgaggaaaaaagagcattttttgccaatcttggcgtggcaacttcagaagataatatggaaagtgcaatcaaagctgaggttgtgttgcttgcggtaaaacctcaaatgatggctgaagtttgttcgccactaagtgcggtggatttttccgacaaattgttaatttccattgccgccggtatttcaactgaacgcttgaacgcattaattccaagcgtaaaatcgatagtacgcgtcatgccaaatacgcccgcattggtgggggaaggtatggcggggttatttgcaccgaaaaatacgagtgaaaattaccgcacttttgcacaagatttattgggagcagtgggaagaacggtttgggtgaatgatgaaactcaaatgcacgcagtcactgccgcgtcaggaagtagcccagcctatttctttttaatgctggaagcgatgcagaaagccttaatcaaaatgaatatagatgagaaaactgcccgtgaattagtgcagcaatctatgcttggtgcagcaaaaatggtgacagaaaatccgcaaattgcactttcaactttgcgtgaaaatgtcacctcgaaaggtggcactactgaggcagcgttagcagtatttgacgcacaacattttaatcaaacaatagagcaagctatgcaggcttgtttgtctcgttcacaagaaatggaaactttattctgatgcaagttcgtcctttttattggctcgcactgagctttctaggttactactgcgcttatggcgtgtttttgcctttctttcccgcatggttaaaatcacaacaatatggcgaagaaatgattggtttggttatcgggagtgcttatattttccgatttgcgggcggattatttttttcatcgctgattaaaaaagccaatcatattattagttccttacgcctattggcgttagcatcggcaattattatggcggctatgagtttagttgcacataatttttggttgttgtttattgctatcggtttgtatgcttctgtgaattcagcaggaatgccgattggggattcgttggcatccacttggcaacgccaaatcggcttggattacggcaaagtacgtttgattggttcttctgcctttatccttggcgtggtggtttttggtggaatgattggctgggttggcgagcaaaatatcgtgtggattttaaccgcacttttatccttctataccatcattcagcttttaaaaccgaccattcccccaaaagatgaaatacctgaagatggcgttcaaaatgatgttggttttattgctttactgaaaaatccgatgacattacgaatcatggttgcagtgggactgattcaaggctctcatgcggcttattatgtttatagcacgatttattggacaagcattgggatctccgtttctcaaacaagcttactttggggcattggcgtattggcagaaattgtattatttttcttttctcgtcgtttatttcaaaatatttctatcagcgtactgctttatatttctgcgtttgcgtgcgttggacgctgggctgtaatgggatatatcgaagatttttggttgatattcttattgcaacttatacacagtttaacctatgccgtttgccattatgcgattgttcgctatatcaccacgcaaccgcaaaaccatattgcgaagttacaaggtttgtataatggtttatccaatggtgtgctcattgctattttcactgcgattgctggcatgatttatccaacgtcgccagcgatgacatttgtatttatgagtatcattgcagctgcagcattttttgtgattccacgtaagttaaatgcctttttgattgttcagcataaataggacgcatcgctttccttgtagaaaagtaatatgaaaaatcttgcacttattgatttgtttcttaacgaatattggattgaaaaagggctttcagaaaataccgttcaatcttatcgtttggatttaaccgcactttgtgattggttggataaaaacgacttgtctttggaaactttagatgctgttgatttgcaaggttttctaggagagcgtttggagaaaggttacaaagccacgagcaccgcgcgaatgttaagtgcaatgcgtaaacttttccaatatttatatcgggaaaaatatcgagtggatgatccaagtgcggtgctaagttcgcctaaattacccagtcgcttgccaaaatatttaaccgagcaacaagtgtcagatttgctcaatacgccagatgttgaagtgcctttggagttgcgtgataaagcaatgttagagttgctttatgcaacggggcttcgtgtaactgagttagtttcgcttacgattgaaaacatgagcgtgcaacaaggcgtagtgcgagtgattggtaaagggaacaaggaacgtattgtgccaatgggggaagaagctgcctattgggttcgtcaatttatgctttatggtcgccctgtgctattaaatgggcagagttctgatgttgtgtttccaagtcagcgcgcacagcaaatgactcgtcaaactttctggcatcgtgtaaaacattatgccattctcgcagatattgatgcggatgcactttcccctcacgttcttcgccatgcttttgccacccatttagtgaatcacggtgcggatttacgcgtggtgcaaatgttgttaggtcatacagatttatctacaacacagatttatactcacgtggcaaaagaaagattgaaacgattgcatgaaagatttcatcctagaggataatttcggggtaaatttttatagttttaaagattgattgtggatttcttattgattaattaatttgacacgcatcacaaattttgaataaaaaattagacagctcaaacatattttgctatctttcgaaaaatttcgacatttattctatcgaaaagtaattttggattctaaaatgaaaaaaatcacgcttttttttaccgcacttttatgcttattttcaacttctgttttagccgaatctaattcaatgcctaaacaatgcgaacaactatttaaagaaacagagaatttgattgcccaagcagaaaaacaacctggaacccacattcaagtaaataaaatcaaaagtaaactaaaccaaagcaaacaacaaattcttcaaatggaattagcgactcagttaaaaagttgtgaagtgggtttagcaaaattaagtaacttgaaaagttatagtgagtaattaaaaaagccttattgaggacaataaggcttttttagtggttaaatttatctagtctgataatttctgcaaaccaaaatgacgataagtttgcgatgttgcaatacgaccacgcggcgttctttgtagaaacccctgttgaatcaaataaggctctaacacatcttcaatggtatcacgttcttcgccaattgcagcagcaagattatctagtcccacagggcctccatcaaaacgctcaataactgcagacaacaactttctatctaaataatcaaatccagcatcgtctacatctagcattgaaagtgcttgttttgccacatttatagaaataataccgccattacgtacatctgcataatcacgcacacgtcgtaataaacggtttgcaattctaggagtgcctcgtgaacgacgagccacctcgaaagcggcttgttgttctaattcaagatttaaacagtccgcacttcttgcaacgatagatgttaaatcttctacagaataaaactccaaacgttgcacaataccaaaacgatcacgcaatggagaagtcaaagaacccgctctagtggtcgcgccaaccaaagtaaaagggggcaaatctaatttaatggaacgagcagcgggtccttcgccaatcataatatccaactgatagtcttccattgctggataaaggacttcttcaatagcaggggaaagtcgatggatttcatcaataaataacacatcatgcggttcaagattggttagcattgcagccaaatcgcccgctttttctaacacaggccctgacgtcgtacgaatattcacgcccatttcatttgccacaatattagcaagcgttgtttttcccaaacctggagggccaaaaatcaataaatgatctaaggcatcttgacgtagtttggctgccttgatgaaaatatccatctgctcgcgtacttgcggctgcccaacataatctgctaatagtttaggacgaatagcacggtcgataacatcttcatcaatctttgcctgactgctaataattctatctgcttcaatcatatttttcctacaatgcggcttttaatgcttcacgaataacttgttcactggttaattcaggtttagcaacgcgttttaccattttttctgcttctgcaggtttataacctaaagcaatcaaggctgaaattgcttcatcagatgaactttccgagtgggattcaatagatggggataatggaatatgcgtactttctacaaagaaatcgctttgttttacgcctttaaatttacctttgagttcaactaacaaacgttcagctgtttttttgccaacacctggaattttagtgagtttagaaagttcttctctctctattgcataggcaaattgttcgaccgacatggcagataaaatcgctagggctaatttaggcccaaccccatttgttttaattaattcacgaaataaagtgcggtctgttttctgggcaaatccaaagagtaagtgagcatcttcccgaacaacaagatgggtgaataaagttgtttcttgtccaatttctggtaaatcatagaaactcgtcataggcaaaagcaattcatagcctacgccttgcacattgagtaaaatttctggaggttgtttttctaaaagaatgccttgtaagcgaccaatcataattcttccgaatgataaaaaaattaacgcatagaataaaataaaactggacgaacatccagttaaatttttaatctaaagcgtcctcggctatatctggtctttaaaagtgcggtcattttttcttgcgtttctgtcattttcacagaattggcaatatgtaaagaatgttgaatagaatacgcatgtgtaatcgcaatagccaacgcatccgctgcatcggcttgaggtttatctgacaacttcaaaatacgagtcaccatttcttgcacttgcactttatctgccgaaccaatgcctacaaccgtttgttttactaaacgtgcggcatattcaaaaacaggcaaatcatgatttaccgctgcaacaatcgccgtgccgcgagcctgcccgagttttaaagctgaatccgcattcttcgccataaacacttgctcaatcgcaaacatattaggttgaaattgcgtgatgatttcagttaccccagcataaatgcgtttcaagcgggttggtaaatcttcaacttgagtacgaattgcgccactgccgagatattccaaatgtctccctgtttggcgaatcacaccgtagcccgttacgcgagatccagggtcaatacctaaaataatgctcataatttctataaaaaatgggtaattaaattacccatttattgcattattaaagttgagatgccacttcgtcacagatttctccgttgtgatatacgttttgtacgtcatcacaatcttccagcatatcaattaaacgaagtaattttggtgcagtttcaatatcaagatcaacggttgttgatggaatcatcgttacttcagcttcttgtactttaaaaccagctgcttcaatgccatcacgcactgaacctaaatcttcccaagcagtatagatttcaaatgaaccatcatcttgtggttgaatatcatcagcacccgcttcgattgccgcttcagttaaggcatcttcatccgcttctgcgattaagattaaaccttttttgctaaataaataacccacagaaccttctgttcccaagttaccaccacatttagtaaaactagggcgcacttgtgagatcgtacggtttgcattatcacttaaacattccaccataaccgctgtaccgcccgggccataaccttcatagattttggtttccatattggtgtcatcgccaccacctacgccacgatcaatagcgcggttgatagtatcgcgcgtcatattgttgctaagtgctttatctactgctgcacgtaaacgtgggttagcactcacatcgccaccaccaattttagctgcggtaacaagttcacgaattaatttagtaaaaattttaccgcgttgtgcatcttgtgctgctttgcggtgtttaatattagcccacttactatgacctgccattttatttccttctatttatctttaagaatatattttctaattgcttccgcgttattggaagattttgtcatttggattgcttgttcaggggaaacccattgatatgccaaatgctcacttaatattggttcgaattcttgctccattgccaacaaaaaccaatgttcacggcaatacgtcacattcggtgcgtatttatagcggaaatgtggaaaaatttcaaattctatgctctcattgcaatcaaaaagtgcggtggaattttccgaaatttctaaccgcacttcttcccatagctcacgaattgctgttttttttggtgtttcaccactttcaatggtgccagtaacagactgccaaaaatcaggatcatcttgacgttggagcattaaaactctgtttgtatctttagtgtaaattacaacgagaacagattgattatttttgtattgcatcattaaaaatgcggtcaaatctgaccgcacttcattcctaatatttcaaacttattctgctttaacgacagaaattgccaactcttccaatgcttgcggatttgcaaaactcggggcttccgtcattaagcacgctgctgccgtagttttaggaaaagcaattacatcgcgaatgttttccgtgcctgttaaaagcatagttaaacggtctaaaccgaatgctaaaccagcatgtggtggagtaccaaattttaacgcatctaataagaaaccgaatttctcgcgttgttgttcttcgtcaataccaagaatacggaacacagtttgttgcattttcggatcaaaaatacgcacagaaccaccacccacttcgtagccgttgatgaccatatcgtaagcattggctaccgcacttgttggatcagcctctaattgctctgggctgaaatcttttggtgaagtgaatggatggtgcattgctgcaagattaccttcttcatcacgttcaaacattgggaaatcaatgacccaaagcggttgccattcgtctaaacgagttaagccaagatcacgacctaatttcaaacgtaacgcgcccattgcatcagtggtagtttgccatttgtctgcaccgaagaataaaatatcgccagtttgtgcattcacacgttctgctaacgctttccatacctcttcatttaagaatttcgcaatcggactttgcacgccttcaagaccagcattaatatcgtttacttttgcccaagccaaacctttcgcaccataaataccaacaaattgtgtatattcatcaatttgtttacgagtaatttctgcaccatttggtactcgaatgactgcaacacggccatttggattgtttgctggctcattaaatactttaaattcaacatctttgacaatatctgctacatctaccatttctaatgggttacgcaaatctggcttatccgaaccaaaacgacgcattgcttcttgccaagtcatcactgggaatttacctaaatctacaccaatggtatcaagccataagccgtgcaccatacgttccataatttcgcggacttctggcgcagttaagaaagaggtttccacatcgatttgagtaaactcaggctgacgatctgctcgtaaatcttcatcacggaaacattttacgatttgataatagcggtcaaaaccagacatcattaaaagctgtttgaaaagctgtggtgattgcggcaatgcatagaatttgcctttatgcacacggcttggcactaaatagtcacgcgcgccttctggcgttgctttggttaacattggggtttcaatatcaaggaaaccattatcatccataaagcgacgcacaaagctggtgatttttgcacgggttttcaaacgctgcgccatttcaggacgacgtaaatctaaataacgatattttaaacgttgttcttcagtattgttttggttaaagtcgagaggcaacacatcagaagcattgtaaacacgcaattccttcgctaacacttccacttcgcctgttgccatatttttattgatttggttttcaggacgtgcaatcacttcgcctttaatttgaatacagaattcattacgtagcccagcagccgctgtcaatgcatcttgatatttcggatcaaaacaaacttgcacaatgccatcacgatcgcgcatatcaataaaaatcaagccacctaaatcacgacggcgatgaacccaaccgcttaatgttacgtcttgcccgatattgttacggtttaatgctccgcaataatgtgtacgcatcatttcaaaatcctttgtactcttttaattatgctcaaaaatctgtcgcaattatagcggaaaaccaagagagataaaaaggttatttatgctgacaaatcaatcaaaaaagcaaagaaaagtaataaatgttcaaaataaaggcttttttgtgccatatcatcagattttttgttatattatgcggcttgttgagattaaattacgttaaggataaccacatgttatttatcaatattacttttgcctgtattttagcgatccgtttttacagtctgtctatttcaattcgtcatgaaaaagcactcattgcaaagggtgcaatacagtatggtaaacgcaattccacactgttgtccattgcccatgttgcattttattttgcggcgatcattgaggctaataagcaaaacctgtcatttaatagcacttcacaaatagggttggcgattttaatttttgctattgcaatgctattttatgtgatttatgagctaaaagagatttggacagtaaaaatttatattttacctgaacatcaaattaatcgctctttcttgtttaaatacgtacgtcacccaaattatttcttaaacattattcccgaattaattggtttatcgcttttctgtcaggctaaatataccgcattggttggactacctatttatttgcttatcttagccgtgcgtattaaacaagaagagagtgccatgtcgcatttatttcctaaatcataatttataaatttcttctaaaataacgactctttctctctacctttaacacattatggtaaaagatactctattttctacccccattgctaaattgggggattttatctttgacgaaaacgttgctgaagtctttccagatatgattcaacgttccgtgcctggctattccaacattattacggcaatcggtatgctggcagaacgtttcgtcacggctgatagtaacgtttatgatctaggttgctcacgaggagctgccacactttctgcacgtcgaaatattcatcaacccaacgtaaaaattattggtatcgataattctcaaccgatggttgaacgttgtcgccaacatattgcggcatatcatagtgagataccagtagaaattctctgtgaggatattcgccacgttgaaattaaaaatgcctcaatggtcattctcaacttcaccttgcaatttttaccgcctgaagatcgcgtggcattgctcacgaagatttatgaaggattaaatccaaatggcgtattaatactttctgaaaaattccgttttgaagatactaaaattgatcatttactcattgacttgcaccatcaattcaaacgtgccaatggttatagcgaattagaagtgagccaaaaacgcaccgcacttgaaaatgtgatgcgtacagattctatcgagacacacaaagtgcggttaaaaaacgtaggattttcacaagtagaactttggttccaatgctttaattttggctcgatgattgcagttaaataattcataacaaatttatttaattcaacttttttatggcataatgcccgcactttttatcacaaaaggattaaatcaatgcaaattttacacactatgttacgcgtgggcgatttagatcgttcaatcaaattttatcaagatgttttaggtatgcgtttattacgcaccagtgaaaacccagaatacaaatatacgctggcttttttaggttacgaagatggcgaaagtgcggcagaaattgaattaacatacaactggggcgtagataaatatgaacatggcacagcatatggacatatcgctatcggcgtggatgatatttatgcgacttgtgaagccgttcgcgcgagcggtggtaacgttactcgcgaagcagggccagttaaaggtggctcaaccgtcattgcttttgttgaagatccagatggttataaaattgaatttatcgaaaacaaaagtactaaatctggtttaggcaactaaagtgcggtcaatttttattgtatttttaataacgtagggattcctacgttattttatttttaagagatagattatgtccgattctcaagaaatcccttatcacaaccaattaaaaaatcgctttcgtggctatttccccgtcattattgatgttgaaactgcaggttttgatgcaaaaaaagatgcgttactcgaactagccgccatcacattaaaaatggatgaaaacggttatttgcatcctgatcagaaatgccattttcatatcaagccttttgaaggtgcaaatattaatccagaatccttgaaatttaatggtattgatattcacaatccactacgtggcgcggtgtctgaactcgatgcaatcacgggattatttcaaatggtgcgtcgaggacaaaaagatgcggattgccaacgttctatcattgtggcacacaatgccacttttgaccaaagttttgtgatggctgccgctgaacgtactggcgtaaagcgtaatcccttccacccttttggcatgtttgataccgcaagtttagcgggcttaatgtttggtcagactgttctcgttaaagcctgtcttgctgctaaaatcccatttgatgggaaacaagcccattcagcgctatatgataccgaacgcacggcgaaattattctgctatatggtcaatcatttaaaagatttaggtggtttcccacatattgcttctgaactagaacaggaaaaaacaactgaaaaagagaccgcactttaagaaaaataaaaaactggttgcaatcgttttatttttccagtagtttaaaagcaattcttatttggagataaaaaatgaacattatccgtcgtcaccatcatcaccattcaactgaataatctttcaggtttttggtgtgcttggaagatttcttccgagctgacaggataataaaaatcttacccctcggaaggcaactttcgaggggttttgttttatttacgatataggaggcattaatttagcgttattctttattcaataaaaattttaaagtaaagtatttatcatttaatttacaaggaaaaacacaatgttatcaaaccctgttgttatctcaatcatcgttttgctggcacttagtttgctacgcatcaacgttattatcgcactggtgattgctgcgcttaccgcaggatttatcggtgatttaggtttaactaaaaccatcgaaacctttacaggcggcttaggtggcggtgctgaagtcgcaatgaactatgcaatacttggagcgttcgccattgctatttctaaatcaggcattactgatttaatcgcttataaaatcatcacaaaaatgaataaaacaccaactgctggcaatttaacttggtttaaatatttcatttttgcggtattggcattgtttgccatctcctctcaaaacttacttccagtgcacattgcttttattccaatcgttgtaccaccactactttcaatctttaaccgtttaaaaattgatcgccgtgcagtagcttgcgtacttacatttggtttaactgctacctatatgttattaccagtaggctttggaaaaatctttattgaaagtattttagttaaaaacattaatcaagctggcgcaaccttaggtttacaaacaaatgtagcacaagtttctttagcaatgttgttacctgttattggcatgattttaggcttactcatagccgtatttattacctaccgtaaaccacgtgaatacaatatcaatgttgaagaagcaacaactaaagatattgaagctcacattgctaatattaaaccaaaacaaattgttgcaagtttaatcgcaattgtcgcgaccttcgcaacacaattagtcacaagttcaactatcattggcggtttaattggcttaattattttcgtactatgtggcattttcaaactaaaagaaagcaacgatatttttcaacaaggcttgcgcttaatggcaatgattggctttgtaatgattgctgcttcaggttttgcaaatgtgattaatgccaccactggcgtaacagatttagtacaaagcctaagttctggtgttgtacaaagtaaaggtattgccgcattattaatgcttgtcgttggtttattaattacaatgggtattggatcatcattctctacagtaccgattattacatcaatttacgtaccactctgtttatcttttggtttttctccgttagcaacaatttcaattgtaggtgtagcggcggctttaggagatgcaggttcgcccgcatcagactcaacattaggcccaacatctggcttgaatatggatggcaaacacgatcacatttgggattctgttgtacctacctttattcactataatattccattattggtattcggctggattgcagcaatgtacctttaacgattataatcccccacttgggggatttttttatgactgttcaacaacttatccaacgcttagatcacaaagttcaacaactttatcaagctcatttatccaaacgagaagaaaaaatcttcgccaaatttgaccgcactttgttcagtgaaaatggacagagtgtttccttttatctaaaagaaatcaatcaaacgctagatagaataaagacattagagtctaacgattctaatcactataattttctagctgagcgtttactcgcccaatgttccgttctttcggaagctttagttcgcaagaatactcatctaactgaatcccaaacaacaacgaaacaaaccattcaaaaatctcaacatagcattcataaattaccaccaagagaacgcctagaaaaatattacgaagcacgagaacaattgaataatctttatcgacagcataaagatttagcacaagctgaaaaaaataatgatgaaaaaatacgttatgctcaacttgcagaagtttataaaaaacgccagcaaaaatgccaagatgcaatcgatcttttagaagaatatttggtgtttaaagaagaagtggaaaaccgtgaaaatacggaaaacaaatgattagaaataaaaaaactaattcttccgaattagttagctcgtaaaaattgatggcggaggaatagggattcgaaccctaggagggcgtaaaccctcgccggttttcaagaccggtgccttcaaccactcgaccattcctccatgatttaatgcgcgtgaataatacgttctctaataaaaaccgtcaagtagaaataatctcatttttatcaagtgattatttttaccacagcttataaaaaatgcctttcctatttatgaacggaaaggcatttttattgaatgaatttcagtgctttttattactacaatatatcgcagaaattaaccgcacttttgtcatctaaacaattattttacgcgagagacgtattcgccagaacgagtatcgactttgattacttcaccgatttgaacgaaaagaggtacttttacaactgcgcctgtgcttaatgttgcgggtttaccgccagtgcctgcggtatcgcctttaagacctgggtctgtatcgacgatttctaattcaacaaagtttggtggcgtaacagtaattggcgcaccattccataaagtcacgacacaatctgcttggtctaataaccatttttctgcatcgcctacggcttttgcatctgcagagtactgttcaaatgtttctgggtgcataaagtaccagaaagcatcgtctttgtatgaataagttaagttaagatccataacatcagcagcttcaactgaagtgcctgatttaaagtttacgtctaatactttgcctgaaattaatttacgaatacgagtacgagtgaatgcctgacctttgcctggttttacaaattcattttcaacgatgacacaaggctcgccgtcttgcataaattttagacctggtttgaaatcactggtagtatatgtagccatatttgaaatatcctaaaaatgagagatggtttgaaaagtgcgtattttaccccaagaacccgtcattagagaagaacaaaattggctcacaattctaaaaaatgccatttcagatcctaaattattgctaaaagccttaaatttaccagaagatgattttgagcaatccattgctgcacggaaactgttttcgcttcgcgtgccacaacctttcattgataaaatagaaaaaggcaatccgcaagatccgcttttcttgcaagtgatgtgttctgatttagaatttgtacaagccgaaggatttagtacggatcccttagaagaaaaaaatgccaatgcggtgccaaatattcttcataaatatcaaaatcgcttgctctttatggcgaagggtggttgtgcggtgaattgtcgttattgcttccgccgacattttccttacgatgaaaacccaggaaataaaaaaagctggcaactggcgttagattacattgcggcgcattctgaaatagaagaagtgattttttcaggcggtgatcctttaatggcgaaagatcacgaattagcgtggttaataaaacatttggaaaacataccgcacttacagcgtttgcgtattcacacccgtttgcctgttgtcattccgcaacggattactgatgaattttgcactttattagcagaaagtcgtttgcaaacagttatggtgacacacattaatcatccgaatgaaattgatcaaatttttgctaatgcgatgcaaaaattaaatgccgtgaatgtcacgcttttgaatcaatctgttttgctaaaaagcgtgaatgatgatgcgcaaattctaaaaatattgagcgataaactttttcaaactggcattttgccttattacttgcatttgctggataaagtgcaaggggcgagccattttttgattagcgatattgaagctatgcaaatctataaaaccttgcaatctctgacatctggctatcttgttcctaaacttgcacgagaaattgcgggcgagccaaataagactttatacgcagaataagatccgataaaatacacataattttttcgccgcacttttgggcttctcaattttgtggctaattaatatgaataagaacaagcatcagaggcaatccagtgaattctatggataaaaatcaacaatcatctcaaaatgaattagatttagggcttaatcaagagccaattacaccaaagaaaacaattcagccaagttcgtcaattttaggtaaaacaaaagggttatttgccaaaaaaaatcatgcgcaaactaactttcagcaacgtaaagaacctacttttggcgattcatcaacgcaagaaaatgatcctttaattccgagtgaaaatttgaaaacagtgcaaaagcctgttcttcaaacttcttccacagaagaaaatatttctgcggttgatgaagaaatcagtgctgaaaataacgcggatgaacccgtcgaaaaggctgaaaaacctattttagctcaaccagaaaaatggaaaatattacaagtattgccagcaaaacatcgccgtttatttatggctattttggtgttggttattttattgattattttcttcgcattaaaaccaagttctgacaccgttgagtctttcactcaatctaacagcaatgaaattcctgtgcagttccaatcgttagatcaaagtcagccagtggaaaccacgattttagataatcctcctgcacaaaatcaaatagctgcagagcaagctaaccaacctgaatctgcgccaaaagcagaggaagcggcgaataatacgacggctcaaaacccattagtagaaaatgcgccaatgcaacaaaatgttgttcaagctccaagtcaaatgccaaatgaaatgactgcggcatctgttgcgcctatgcaaccagctcaagcagaacagcctcaaatgcaagctgcacaaacgcaagcagaacagccaaaaacaactgcgctagttcagccgataaaaaaagcggtagagccacaagttgcgcataaagatactgtgaaaaaagaagtgaaagtggcggagaaagcacaggctccatcaaaagcaacggaacaaaacgtcgctaaaacagcaggaaacgcaccgattgttgaagccaaacctgttcaagctaaaaaagaaaagaaagttcaaatcgttgatgcaaaacctgtgagtaaatctacagcttctcgtctttctgcaaaaacattaactgtgccgaaaggtgtttcactgatgcaagtcttccgtgataatcaacttaatatttccgatgtaaacgcaatgagcaaagcggcaggggcgggaaatgttttaagtagctttaaatctggcgataaagtaacggtatctgtgaataatcaagggcgagtaaatgaaatgcgtttatccaatggtgcgcgttttgtgcgtcagtctgatggttcttatcaatataaaaaataattttttgggcgagtaatcgcccctttttctttttaagttcttttctcaaggtaggatttatgttgaaaaaaacatcccttatttttaccgcacttttgctggttggctgtgtgcaaaatgcgaatgtgacaacgccccaagcgcaaaaaatgcaagtagaaaaagtggataaagccttacaaaaaggcgaagctgaccgatatttatgtcaagatgataaagttgttcgtgttatacacgccacgcataaaaaatacaaaaaaaatttgcactatgttaccgtcacttttcaaggcatatcagaaaaactaaccttaatgatttctgaacgtggtaaaaattacgccaatattcgttggatgtggcaagagcgtgatgattttagtacgctaaaaacgaatctcggcgaaattttagcaacgcaatgtgtctcacaaacaagtgaacgcttatctggacaataatcgtgcaaagcgaacttcaacgtggttttgttttgcatcgtcgcccttatagtgaaacgagtcttttagtggatttgtttactgaagaaagtgggcgtttaaccgtaattgcaaaaggggcgcgcgcaaagcgttcatcttggaaatcggttttgcaacctttcacacctttattgttgcgttggacgggaaaaagcacattgaaaaccctcactaaagctgaacctgccgcaattacactgcctttacaacaaatcgccctttatagtggattttatgtaaatgaattactcactcgtgttattgagtctgaaacgccaaatcctgcgctttttcaacattatttaaaatgcttaacgggcttggcaacggaaactaatattgagccaacgttgcgtctttttgaatttcaacttttacaaattcttggttacggcgtggattttctgcattgtgctggttctggcgagccagtggatttctcaatgacatatcgttatcgtgaggaaaaaggtttcattgcgtctttagtgaaagataatctcacgttttacggcagagatttgttagcctttgaagcccttgatttttctgatgatgcggtacgtcaagcggcaaaacgttttactcgtattgcactgaaaccttatcttggcgataaaccgctaaaaagccgagagctattcactcaaaatattttacttttaaaataatggttcttctttataccccaaagcaaaaaacaaaaaatgttcaaaccattaccgctgatattcttgatttagattatcaaggtttaggcgtggcgaaaattaatggtaaaacttggtttattgaaaatgcacttccgcacgaaaaagtggaatgtcgtattctggaggataaacgccaatatgggcatgctacggcaaaaaaatggcgagtaaaaagttctgaacgtttagaacctaaatgtgctcattttatgcgttgtggtggttgccaaggacagcatattcctattgaaatgcagaggaaagcgaaacaatccgcattgtttaagcggttaagtaaattacagtcagaaccgatttcatttcaacctatgatttgtggcgatgcttgggcgtatcgtcgtcgtgtgcgtttgagtttatggtttaacccaagcacaaaacaaatcgacatgggctttcgtcagaaaaataccaacgatttaatacccgttcaatcttgcgaagtagcagaacctgcaattaattatttactgcctaaattaaccgcacttttagaaaaattttcagcaccgaaacagcttgggcatattgaattggtggctgccgataatggcgtcgcaatgttgttacgttacaccaaaaaccttgcggaaattgaccgcactttattgctcaaatttgctgaacaagaaaagttaatgctgtttttacaaagcgacaaaggcattgaacaaatctatggcgatgcgccttattatcaattttctgatggcataaaattacattttgatattcgtgattttattcaagtaaatagtgcattaaatgaacgtatggtcaatacagcgttggattggcttgaattgagccaacaagattgcgtgctcgatttattttgcggcatgggaaattttacgcttcctcttgccaaacgcgtgaaaagtgcggtaggaattgaaggtgtttttgaaatggtacaaaaagcggcgcaaaatgccgcaagaaaccaaatcaaaaatattgaatttttccaagccgatcttgaccaatcctttgttgaacaaccttgggctaatcagtcgttcaataaaattttgcttgatcctccacgcagtggcgcagctttcgcgttaaatgctttgtgcgagctgaaagcagagaaaattttatatgtgtcttgtaatcccgcaacattagtgcgcgatgcggaaattttacgtgattttggctacaagattgaaaaaagtgcggtgatagatatgttccctcatacggggcatttggaatcgataaccttattcactacaaaataactcggttattcggtacaatatccacccaaaataaaagcgacaggaagttgcttgctcttcatcaacaagggggtattatggttgctgttcgtggttcgcatttgttaaatccgcagaattttgtgattgaacaatggtgcgctggcttaaaactagcagaacaaacagaaaaaagtttgatcgatgcgtggtattacgcacgtgatttaatgaatgcctatcccgatgaaatgaagaatgcgaccttaatgctgcagtctggcgtggaaatggtagaaattttgcacgaacttaatatggatgcggaaacattgcttactgccatgttgtttcctattgttgcaaataaattaacagactgggaaagtctaaaagaaaaatttggtgcgaaaattactaaattacttaaaggcgtgttggagatggataatattcgccaacttaatgccagtcattccgctaacgctctgcaagtggataatgttcgccgtatgttgttggcaatggtggacgatttccgctgcgtgatcatcaaacttgccgaacgtattactttcttgcgtgatgcagagtatcgttgtgcagaggaagacaaagtccttgccgtcaaagaatgttcttatatttatgcccctcttgccaatcgtcttggaattggtcagctgaaatgggagttagaggattactgcttccgttatctccatcctgaacaatatcgcgctattgctaaattattacaggaacgtcgtcttgatcgtgaacattacattgctgatttcgtcagtgagttgagcagttatttacgtgaaaatatcaagcaagtggaagtgtacggccgtccgaaacatatttacagcatttggcgcaaaatgcagaaaaagaatcttgagttcagcggtttatatgatgtaagagcggtcagaattatcgtgcaaaaattgcaagattgttacaccgcacttgggattgttcatactcaatttaaacacttgcccaaagaatttgacgattatgtggcgaacccgaaaccgaacggttatcaatctattcatactgttgttttaggtaaaggtggcaagccaattgaagtacaaattcgaacccaacaaatgcatgatgatgcagagttaggtatggcggcacactggaaatataaagaaggcaatacaggcagtatgtcggcctatgaagaaaaaattgcgtggttgcgtaaattgttagcttggcaagatgatattacggattctggcgaagtgatggcagagttgcgtagccaagtgtttgatgaccgtgtatatgtgtttacgccaaagggcgaagtggtggatttgccaacgggatctacaccattagattttgcttatgccattcatagtgaaattggtcatcgctgcatcggggcaaaagtggcaggacgtattgtgccatttacctatcagctacaaatgggcgatcaaatcgatattattacccagaaaaatccgaacccgagccgtgactggttaaacccaaatttaggatttacccatacgtcaaaatctcgcgcaaaaatccaagcgtggtttaaaaaacaagatcgcgataaaaatattccagcgggtaaagaattactcgataatgaactcacgcttttgaatttaagtattaagcaagtggaaccttatgcgttaccacgctataacttgaaaaatttggacgatctttatgcaggtattggcagtggcgatattcgtttaaataacttaatccatttcttgcaaagtaaattgattaaagtgactgctgaagaagcggatcaagagattttgcgtcatgttgctaataaaagtgcggtcaattctcagcagaaatctgaaaagaacaatggctatgtgattgtggagggcgtgggcaatcttatgcatcatattgcgcgttgctgccagccgataccaggcgatgcgattgttggctatattacaatgggacgtggtatttctattcaccgagcggattgtgaacaattcttagatttgcaagcggctcatccagaacgcgtggtggaatcaatttggggcgaaaattacgcaagtggtttccatattaatatccgtattgtggcaggcgatcgcaatggcttattacgtgatattacgacggttctggcaaatgaaaaaattagcgtgttaggggtctcaagccgtgctgataccaaaaaacagcttgctaccattgatatggaaattgaactccataatgttgaaagtttaagtaaaatattggctcgattagcaaaattagatgatgttatcgaagcgaaacgtttataaaaataggaaaatttatgtataaaacgacggggctaacccatttaatcaattccacgaaatattcgttacaaggcttaaaaagtgcgtttaaaaatgaaacggcttttcgccacgaatgttttttagcctgcattttaattcctcttactttctttttaggcgaaacaaaaattgaaattatattgatgatttcttctgttttgcttgtgatggcgttagaacttttaaacagtgcggtagaggcagttgttgatcgcattggtacagaacgccacgaactttcagggcgtgcgaaagatcaaggttctgcatcggtatttattgccctttgtattgtcggtatcgtttggggcggaattttattcttctagcccttccaaagtgcggtaagtttttaccgcatttttgatttatccaatcacgtcaaaattatttataaaaataaggaaaaatatgaccgcacttttaaaaattggtctggtgtctgtttctgatcgcgcatcagcaggcgtgtatcaagatcaaggtatcccagaattacaggcttggttagaacaagcgttggtagatcccttccatttggaaacaagattaatccctgatgaacaaccgattattgaacaaaccttaaaagagctagtggatgaacaaggttgccatttagtgctgacaactggtggaactgggccagcaaaacgcgatgtaacgcctgatgcaacccttgctgtagcggatcgagaaatgccgggttttggcgaacaaatgcgtcaagtgagtttgcattttgtgcctaccgcaattttatcccgccaagtgggtgtgattcgtaaggaaagcttgattttaaatcttcctgggcagcctaaagcgattaaagaaaccttggaaggcgtgaaagataaagaaggaaatgtgcttgtaaaaggcatttttagcgcagtgccttattgtttgcaactgattaacggcttatatattgataccaagcctgaaatcatcgaaagtttccgtcctaaatccgcaagacgcgaaaatctggagaaatagcatgaaaaaaatcgaagcaatgattaaaccctttaaattagacgatgtgcgagaaagtctttcagatattggtatttcaggtatgacaatcacggaagtacgcggatttggtcgccaaaaaggtcatacagaactttatcgtggtgcggaatatatggtggattttctgccgaaagtgaaattggaagtagtggttcccgatgaacttgtggatcaatgtattgaagcgattattgaaacggcacaaacaggtaaaatcggtgacggcaaaatttttgtttatcacgttgagagagcgatccgcattcgcacgggcgaagaaaacgaggatgcgatttagtgcaaaataatttaaatttacaccgcactctgcttggcattgcctcggtgattattatcttagctggcgtaaaattggcggcagaaatcgtggtgccattcttgctatcactctttattgcgataatttgctcgccgatgattaaggggatgacgcaacgccgaattccccattggctggccattactttgcttttcgtcttgatttctttggtgtttttcttcttagctgggctgattaacagcactgcaagagaatttactcaatcaattccacaatataaagttttgctttcacaacgcgtgagtgatttaactggattgttgcaacgtttcaatctgcctttcacgctttcgcgtgaaaccatccaagaaaattttgatccaagcatcattatgaattttgtaagccgagtattgctaaatttctctggagtggtgagtaatgtgtttgttttagtgttggtcgtgatttttatgcttgctgaagcgccaacgatgaaacataaatttgcaatggtaattagttcaacacctcatgatgcagtcaaagaagaacgccatattgatcgcgttttacaaggcgtaattggttatcttggcattaaaagtatcacgagtttgcttactggcgttggtatttttattttgttggaagcctgtggggttcaatatgccattttgtgggcaaccttgagtttcttgttgaattatattccgaatattggttctatcatcgcggctattccgattattgtgcaagccttattactaaatggttttggcattggctttggcgtagcaatcggtgttattgcgattaatatggttgtcggtaacattattgaacctaaaatgatggggcaacgattagggctttcaactttagtggtgttcctttcattattgttttggggatggttactgggaaccgtgggaatgctactgtctgtccctctgacgatggcattaaaaattgccttagagtccagccccaatacggcgaaatatgcctgtctattaggagatgtcgaagatttcaaatagattttagagataaaagtgcggtgaattttcaccgcattttttatgataagtcttgcggatcgacgtccaaaattaaccgcacttggctgtttttttctagttcggcttgttgatattctcttaatgctttttgcaacgtcattcttgatggatgctgcaataataactgccagcgatattgccccgcttttttgctgaacggtgcaggcattgggccaagcatttgtaatcccgtaatttgcttcgattgaaaaaaatctgcaatttggcttaagcaattttctgcaagctcagaatgtcgagcctgtgctttgaataacgcctgaaaagtgaaaggcggcaatcccattgaatggcgtaattgtaaggtttcttttgcaaaagcttggtagccattcgctaataatgtagtgagtaaaggatgatctggataatgtgtttgtagcaccacttcaccttgtttatcggcacgtcctgcacgtccagcaacttgaatataaagttgagctaaacgttcttctgcacgaaaatccagtgaaaataatgcactatctacattcactaaggcaacgagagtaacattcggaaaatgatgtcctttcgcaagcatttgtgtgccaatcaaaatttggcttttgccttgttgaatatcttctaaataaccttccaattttcctttacacgccgtgctatcgcggtcgattcgcgctacagaataatgaggaaatagcgttttcaaggtttcttctaattgctctgtgccgagaccagtagtaactaaatgggtagaaccgcaatcgccacattggcgaggaatagttttttgcgcgccacaatgatgacaacgcaatacattttgatgctgatgataggtataaggtttttcacaatgagggcattgtgcaatccaaccacattcatggcaaagcaatacgggcgcaaagccacgacgatttaagaaaagcaatacttgattgcctttttcgaggtgaactttcatccgttctaataagggtttcgaaagcccgttttgtatgttttgatttttcaaatcaacaacgaaatgacgaagtgcggtagaatttcccgctctttttgataaaactaaatgttggtatttgccgttttgtacattattaatactttctaaacttggcgtggcagaacccattaatactgaaatgttcagtttttgagcaagcacgattgctaaatctcgtgcgtgataacgccaactgtcttgctgtttgtaagacgcatcctgttcctcgtccaaaataattgcaccaagattagaaaattgcgtgaacaatgccgatctagtgccaatcacaatagcactttgtccagagcgggcgcgatcccatacataaagccgttgcgtatcggttaaattagaatgcagtacatcaatttctacattgaaacgcgctttgaaacgttgtaccgtttgaggtgttagcccgatttcgggtacaagcactaatacttgcttacccgattttaaaatttcttcaatatactgcagataaatttctgttttacctgaaccagtcacgccatcgagcagccatacattgaaaccagaatggaagagcagttggctgaaggctaaggcttgctgcttatttaaggttaaacgattttcagcattgacaattgggttattgcctaatctttgttgccagcttaggggatttgtttggatagtaatttcctcaataaaccctttggcttttaaggctgaccaaatggcagaggaaaaattattattgcctttttcaagatcagtttcagataagcattgtagggcttcaacttgctttttcgagcgttttaattcgccttgttcaagggcatttttccccgcatccgtaattcgccaaaaagtgcggtcattttttaccgcactttcgccgttacgcaatttcacaggcaaggcttgaaataacacatcgcctaatcccgcttgataataatttgctgcccaatgaagccaatcccaataaatgggcgtaaaaagtggggctaaatctaaggcgtgaataattgctttgagtttattttctggcacgtccgattttgtcggaaaatcagccacaatggcgacacgtttttgggtgccaaaaggcacaagaacacgcataccgatttgtaatgaaacatcatcggggacgaaataatcaaataagcgaggaagcggcacagccagtgccactcggacaattttcataatcaaccttgggaaaaaatttgccctattatacgagaaaaattggtataatcgccgccaatttttttcacgaacaagatttttatgacacaaacttttgctgatcaaaaacgtaaaaccgttgaaaccgcagaatttaccgaagatggtcgctataagcgcaaagtccgtagttttgtgctccgcactggtcgtttgagcgaatttcaaagaaatatgatgaatgataactggggaacacttggtttagattaccaaacggaaccttttgattttgctaagatttatggcaatgataatccagttgtattagaaattggctttggaatgggaaaatcgctcgtggatatggcttttgctaatcctgacaaaaattaccttggcattgaagttcatactcctggcgttggtgcttgtattgcttatgcagtggaaaaaggcgtaacgaatttacgcgtgatttgccacgatgcaacggaaattttacgagacagtgttgctgatggtgcgcttggcggtttgcagttatttttccccgatccttggcataaagcaaaacatcataaacgtcgtattgttcaaccgcactttgtgacacaagttatacaaaaattaggtgaaaatggttttatccatatggcgacagactgggaaaattatgcagagcaaatgctagaagtattaagcgcaaacaccaatttagtgaacacttcgaaaaatggcgattatattccaagaccagattttagacctttaactaaatttgaagccagaggttacaaacttggacatggtgtttgggatttatattttgtgaagaaataagcggattttaactaaacccaatacctaatttatgaatttaatataaaatacgcgtttgaatataaccttaataggagaaatacaatgtctaaatcttacaatcaacgccaacgcaaaaaacttcatctcgcggaatttcaagaactgggttttcttgtaaatttccaatttgtagaaggtactgcgattgaaactgtagatgaaaccgttgatcgttttattaacgaagtgattcaaccaaatggattagcttatgaaggtagcgggtatttacattgggaaggtttagtttgcctagaaaaaattggcaaatgcgatgaaagccaccgtgaaactgtgaaaaaatggttagaaacaaatggtttgcaacaaattgaagtaagcgaattatttgatatttggtgggaatatccagcaaaagctgaataatctaaattgaaaacagcatagtaaaaattgctatgctgttttgttttaatcccttgcaaaattcattaaaccttagattttttgatctataacaaataaagttcaaataattgacaaactacctattttgggttgttctcattcattcatcgtaaacacataatccttcgtctacagaagcattcagaaatatttgaaagacattatgaccgttgaaaatttacctcgcagacaatttttacgcggtaaattttcaaccttgagctgtttagaaaataatcaaaaacagaattttgtgggtattagaccgccttggtctgtggaaaattctatttttgtagcacaatgtacgcgctgtggcgactgtctttctgtctgtgaaaccaatattttggtaaagggcgatgctggttttcctgaagtgcgttttgataatggcgaatgtactttttgtgggaaatgtgtagatgcctgtaaacagcctattttttatccgcgtgaccagttaccttggtcacataaaatcgacattggcgtagcttgtttaacattgcaccgtattgaatgccgaacttgccaagataattgtccagctaatgcgattcgtttcaaattacaaatgggtggcgtagcacaacctttagttaatttcgatgcttgtaatggctgtggggcttgtgtacaaggctgtcctgtgaatgcaataacaatgaacgatctaaaacaaaatgaataatacaaatttaatatcagaaaatgcgagagattggcacgttgttggattgatcgtgcaaggtaatccaaaaaaattatcagcaattcaaaccgcacttttagcgattgagcatactgaaattccgacttttgatgaaaaacttggaaaatttgtggtggtaatgcaatcgaacgatcagcatctcttgcttgaaaaaatggaaagtgtgaaagatatcgacggtgtgattaatgtatcgttggtgtatcacgagcaagatgaacaaaataaatagttttaaaatcaaacgtttaacgtgggggaaaacgcgatgaatttaagtcgtcgagactttatgaaagccaatgcggctatggcagccgcaacggcagcggggctaaccatcccagtcaaaaatgtggttgcgactgaatccgaaattaaatgggacaaagcagtatgtcgtttctgtggtaccggttgtgcagtattagttggtactaaagatggacgtgttgtggcatctcaaggcgatcctgatgcagaagtaaatcgtggtttaaactgcattaaaggttatttcttgccaaaaattatgtacggtaaagaccgtttaacgcagccgcttttacgtatgacaaacggaaaatttgataagaacggcgattttgcgccagtttcttgggattttgcgttcaaaacaatggctgaaaaattcaaagaagcgttcaaaaagaacggtcaaaatgcagtaggtatgtttagttctggtcagtctaccatttgggaaggctatgcgaagaacaaactttggaaagcaggttttcgttctaacaacgtagacccgaatgcgcgtcactgtatggcatctgcagcagttgcatttatgcgtacttttggtatggatgaaccaatgggttgttataacgacattgaacatgcagatgcttttgttctttggggctcaaatatggcggaaatgcacccaattttgtggtcgcgtattactgatcgccgtatttctaatcctgatgttcgtgtcactgtactttctacttacgaacatcgtagttttgaacttgccgatcacggtttgatatttacaccgcaaactgatttggcaattatgaactacatcatcaattatcttattcaaaataatgcgattaattgggattttgttaataaacataccaaatttaaacgcggagaaacgaatattggctatggtttacgtccagagcatccattagaaaaagacacgaatcgtaaaacagctgggaaaatgcacgattcttcttttgaagaattaaagcaacttgtatcagaatatacagtggaaaaagtatcaaaaatgtctgggttagataaagtccagttagaaactttagcgaaactttatgctgatccaacgaagaaagtggtttcctactggacaatgggctttaaccaacatacacgtggtgtgtgggtaaaccaattaatctacaatattcatttacttactggaaaaatttcaatcccaggttgtggaccattttcattaactggtcaaccttctgcttgtggtacggcgcgtgaagtaggttcattccctcatcgtttacctgccgacttagtggtaactaatccgaaacaccgtgaaattgctgaacgtatttggaaattaccaaaggggacggtttctgaaaaagtggggttacacacaattgcacaagaccgtgcaatgaatgatggagaaatgaatgtgttatggcaaatgtgtaacaataatatgcaagcagggccaaacattaatcaagatcgtttgccaggctggcgtaaagaaggcaacttcgtgattgtttcagatccttacccaactgtatccgcactttctgctgacttaattcttccaacggcaatgtgggtggaaaaagaaggggcttacggcaatgcagaacgtcgtacccaattctggcgtcagcaagtcaaagcaccgggcgaagcaaaatcagacttatggcaattaatggagttcgcaaaatacttcacgacggatgaaatgtggacagaagacttacttgcacaaatgcctgaatatagaggtaaaactttatatgaagtgcttttcaaaaatggtcaagtagataaattcccattgagcgaacttgctgaaggccaattaaacgatgaatcagaatattttggttactacgttcacaaaggtttatttgaagaatacgctgaatttggtcgcggtcacggtcacgatttagctccatttgatatgtatcataaagcgcgtggtttacgttggccagttgtggagggtaaagaaaccttatggcgttaccgtgaaggctatgatccgtatgttaaagaaggggaaggcgtggctttctacggttatcctgataagaaagcgattattcttgcggtgccttatgaaccaccagctgagtcacccgataatgaatacgatttatggttatcaacaggtcgtgttcttgaacattggcatacggggacaatgacacgccgtgtaccagaattgcatcgagcatttccaaataatttagtatggatgcacccattagatgcacaagcacgtggtttacgtcatggcgataaaattaagatttcatctcgtcgaggcgaaatgatttcttatttagatactcgcggacgtaataaaccacctcgtggcttagtatttaccactttctttgatgcaggtcagcttgcaaatagcttaacactagatgcgacagacccaatttcaaaagaaaccgacttcaaaaaatgtgcggtaaaagtggaaaaggctgcgtaaaaaccatgtaaaaatcaaccgcactttatttctcccatcaataaaagaggaagatgaaagtgcggttaaaatctaaaaagaaaatgaagaaacccgcacttaatcctgaacgtagaaaatttcttaaagaagcaacccgtactgcgggtggtttagctggcgttgggattttgttgggattgcagcaaaatcaaagtcttgcacgcgaaggtgtgccattacgccctccatttgctttgcaagatgcgaaagcgttttctgccgcttgtattcgttgcggacaatgtgttcaagcctgtccttatgacatgctgcatttagcctctttattatcgccagtagaagcgggaacgccgtattttattgcgcgtgataaaccttgtgaaatgtgtcctgatattccttgcgcaaaagcctgtcctagtggtgcattagatcgtcaagcaacagatattaatgaatcgcgtatggggctgtcagtactgttagatcacgaaacttgcttaaattatcaaggattacgttgtgatgtttgttatcgagtttgtccattaatcgataaagcgattacattggaaacacaacataatccacgttctgataagcatgccttatttattccaacagtacattctgatgcctgcacgggatgtggaaaatgtgagcaagcttgtgtgttagaagaggctgcgattaagattttaccaatggatctggcaaaaggtatgttaggtaagcattatcgtttaggttgggaagaaaaagcgaaagctggccattctcttgcacctaaagatatgatttcgttgccaactcgaacaccagaaggaacaactgtaattcctgaaccagcagaacccgtgcttgcgcctattttagggagtggcaaataatggcaaatgcaccaaaatttgcagggaaagaggctcgagaaaaatggggctggtggtatgcaaaccgctttttgttttggcgtcgattaagccaacttagcattcttgcgatgtttttgagtggcccttattttggcgtgtggattttaaaaggtaattatagtggtagtttattactcgatactattccactaagtgatcctctaattaccgctgaaagcttggctgcaagacatttaccagatgctctcactttaattggtgctgcaattattgtgttattttacgcagtacttggtagtaaagtattttgtggttgggtatgcccactaaatgttgtgactgactgtgctgcgtggcttcgccgtaagttaggcattcgccaaacagcaaaaatttcgcgcggtttacgttatggtattcttgtgcttattttactaggcagtagtgtcagcggaatgttgctttgggaatgggttaatccagtggctgctcttggtcgcgcctttgtatttggttttggtgcaacaggctggttattacttgttatttttctttttgatttattgattgctgaacacggctggtgtggacatctttgcccaattggtgctgcttatggtgtgattggtgcaaaaagtttaatccgtattaaagtgattgatcgcgctaaatgcgataattgtatggattgttacaatgtttgtcccgaagcccaagtgttacgttcgcctttacacggaaaaaaagacgaaagcctactagtgctttccaaagattgcatcagctgcggacgttgtattgacgtttgcgctgaaaaagtttttaaattttcgaccagattcgatcattcaggggagtgattaatatgactaaacaggtatctaaaattttagcgggattatttaccgcactttttgctggctcactgatggcatctgatgcaccagcagtgggaaaagatttaactcaagcggcagaaaatattccacccgcatttcataatgcaccgcgtcaaggcgaattacccgcattgaactatgtaaatcagcctccaatggttccacatagtgtggcaaactatcaagtgacaaaaaatgtaaatcaatgtttaaattgccacagcccagaaaattctcgtttgagcggtgcaactcgaatcagcccaactcactttatggatcgtgatggaaaagtaggttcaagttcatcgccacgtcgttatttctgtttacaatgtcacgtttctcaagcaaacgtagatccgattgttccaaatgatttcaaaccgatgaaaggttacggaaactaatttaagaggtctatatgtctgagaaaaaaccaaatatcttaaagcgtttctggcaatggtttagaaaaccaagccgtatggcgataggtacaattattatcttatcggctattggcggtattctttcttgggttggttttaactatggtttagaaaaaaccaacaccgaacagttctgtgcaagctgccatatgcaagatgcttatccagaatatttacatagcgtgcattatcaaactcgtactggtgtgggggcaagttgtccagattgtcacgtaccacacgaatttggtgcaaaaatgaaacgtaaaattattgcagctaaagaagtatatgcgcactatactggaaaagtggataccttagaaaaattcaatgcgcatcgtttagaaatggctcaaaatgaatgggcgcgtatgaaagctaacgattctaaagaatgtcgtaattgtcataatgtagatcgtatgaacttcaatgatcaacgttctgtggcggcacgtatgcaccaaaaaatgaaaactgaaggtaaaacttgtatcgactgtcacaaaggtattgcacaccaattacctgatatgagtggcgttgagtcaggcttcaaagacgagaagtgattttctaaaaataggctgaaaaaataccgcacttttttcagcctattataaatttgggtagtttataaaaaaatctgcactttaattcgctgatttattcagcctttaaggtgcagattaattatattttctaaagtgcggttaatttttagattatttttagcctaagattttatctaactcttggctaacttcttctactttttgtgtaccgtctaaacggaaatattgagtattccccgctttcgcttctgcttggtaataatcaattaatgggctagtttgtttatgatatacggctaaacgatctaatacagtttctggtttatcgtctgcacgaataattaaatcttcgcctgttacatcatctttaccttccacttttggtggattataaacgatgtggtaagaacgaccagacgcttggtgtacgcgacggccactcatacgttcaacaatcacttcgtctggcacatcaaattctaaaacaaagtcaattttaacacctgaatctttcagtgcatccgcttgtggaatagtacgagggaaaccatctaacaagaaaccatttgcacagtcagcttgagcaatacgatcttttacaagagcaacggttaattcatctggtactaatttaccttcatccattaatgctttagcttgtttgccaagttcagtccccgctttgattgcagcacggaacatatcaccagttgaaatttgcgggataccaaatttgttcataataaattgtgcttgagtgcctttacctgcacccggtgcacctaaaagaataattttcataaaaaatctccattaatacaaaacgtgattaagatactgataaagcatagtgcggtcaaattttttataatttttaccgcacttttatactgagctggtcttattatttttttgcttccaaggtgctacccaaaataaacaaagcatgccgggaatcgctaaaaataaacaaaaccaaaaatactgataataccccactgctcccacaacataaccagaaagtatacctaaaactttacttggcaaagctgaaaggcttgtaaaaagtgcaagctgtgttgcagtataaagaggattactctcacgcgccataaaagccacaaaagctgcggtaccaagtccaacgccgatatattctgctgcaatcacaacacctagtttccataactcggcagatgtaataacatcaaaatgaccgaaagcagacaaccaaataaacccaccaattgttaccatttgtacaagcccaaatagccacaatgcacggttaatacccagttttagcattatcataccaccagcaagcccagataaaatgcttgaccaaagtgaagtactttttacaacaatagcaatatcctctttgctaaatcccatgtcataaataaatttggtttgtaacgttgtggcaaaagaatccccgaacttatacaaaaacaaaaatagtaaaaaaccgatagcctgaatgacgcccttacgctggaaaaattcttgtaatggaatccaaaatgcttgatagaacggctgattagtttgctgcatgtctatttttggctcttttgctaaaaatagtgtcatgaagatgcctgctaacatacaaagtgcggtccacaaaaagacggtttcccaaggataaatcgccgccaaatatagcgataatccaccaggaattaatcccgcaattcgataagcattaatatgaatagtgtttcctaaacctaattcatgatcactcaaaatttcacgacgatacgcatccaacacgatatcttgtgtagctgaaaaaaaggcgataagcaacgcaatatttgctactgtacccagttgtgtgagcggatcaaacaggctaatgatgtaaagtaaaatcaataatgccacttgtgaaagcagcatccagctacgacgacgccctaaaaaactcgggaaataacgatccaataatggtgcccacaaaaatttcaagccataaggcaacatcacacccgttactgcgccaataagctcaattgaaagatgtttatctgtcagccaaacaggcaacatttgcaataacacaaataatggcaaaccagaattaaaacctgtgaaggcgcaaattaacatcttgcgcgtaaaaatttgggaagaaaaggaatttgacataaagtgcggttaattttggttgtattttagaaatttcgcctttcaattaaaggatttttgtaaaaattaggggatttttaatcattcccccaatgtttagcattcttcttcctaaaaaagaaaaacaaatattagagaatattaatctctatacccttttgaattatttttctgccagttccacgtgtcttgcatcattttttcaagaccacgttctgccacccaaccaagctcttttgcagctaaactaggatcagaatagcaagtggcaatatcgccagagcggcgttctacaagtttatatggaattgtaatattgttggctttttcaaaggcttttaccatatctaatacggaataaccatggcccgtaccaagattataaatatgtaagccagcgtcattttcatgacgttgaagcgcttttaaatgccccacagctaaatccactacatgaatataatcacgcacacctgttccatcatgagtgtcgtaatcactaccaaatacagaaagttgtgctaatttaccgatagcaacttggctaatataaggtaataaattatttggaataccatttggatcttcaccaatcaagccactttcatgcgccccaactggattaaaataacgcaagatagtcatgctaaattttggttccgcttttgctgtatcgcgtaaaatctgctcaaccatatatttagatgtaccataagggttggttgtaccgccgacttcacaatcctctgtaattggaataatttttggatcgccgtaaaccgttgcagatgagctgaatacaaagttccaaacacccgcttttttcatttcttgaattaatacaagggtgccagcgacattgttcatgtaatattctgtcggcttttgaacactttcccctacggcttttaaccctgcaaagtgaataaccgagttaatctcattttctgcaaaaattttttgtaacaaagcacgatctaaaatatcgccttcataaaactttgcttctttgcctgtaatttgttttacacgctcaagggattttggcgatgaattgcaaagattatctaatactaccacctctttgccaacatttaataattctacaactgtgtgagaaccgatataaccagcgccacccgtcactaaaatggccataatgatttccttgttaattattgagactaaaaaattatatcactattttgtgtggtaagaatggtgattttcaataaaataaaaaacctgttgctaaaaagtattgttgtagcgagtgagataacctctcatatttagggctatgtccattagttgtgtgatataaggttatctaatcccattttcttgattttaaggcgtgttttatatcattaggtaaacgtaatatatcccagatcaaccgaaaaatcagattttggtaaattcttggtttggaatatataccaatttttttatatacaaacttcggcggaattaaaatatcttgtgtgtaatttttcttttcttcgagaataaaagtaattgggttattcagtggtgataaaggaaaataattacatagaggactttctggcgaaatgcaataaatatttactccataatgtttttgtaaaaaataaagtgcatttaaatcatattccatagaatggatatcgctttgacttttattttgtgaaaaagaaggtaataatttaataatattttctttttgatgatgaaatgcgtaaggattccctttttcttgataaaaatcaatacctgttaaataaagatctttataacccattacagttgccactgcacacatataaacgcctgatgtaattctcttattttcatataattcgttatattgtaaataggcatcaaaggcgggtagcttgtttaaataataatgtccaatatcaacttgtgttagtaatttttgtacatttttaattttcttgccaagaaaataatgatcttcaaaataaaattgattgcaacggaaaacatcataatctttaggtaataaactatagtcaattgattttaaacttgttccattacctgcaataatgacagactttgattgattgattgattgattgattgattgattgattgattgattgattgattgattgattgattgattgacatattgtaccgttcattgaataaaatagaagttatccctaaaaaataataaacattatatagatttatagaactttttactaaacgttgattataccttcctaaaattattatctaatatcagttgtactatctccgttgtatcttagcaagaaaaatttaaaaatgcttttcttgttccattcggatagaaacctaatcgcttgttttttctaccaaacaagcgtaaacttaccaacaatttttagtcggggtgccgaaaggctgagatgatacccgtgaacctgaaacagttagcactgacgtaggaaactaatatgccaaaaaatccattttcttttcattccatttcttatcctttcttttttattacgcattccctttaatcattgaggcgagcaatggtgcgtattcaagatttgagtcttgcctttaatgggcaaacgttatttgagcatcttaatttaaccctgttgccgaacgaatgggtaagcttgttgggcagttcaggcgtgggaaaatcgacacttttgcgactactggcggacattgaaacgcaaggtgtggtgcaggggaaaatcctatttgaaccgaaaattcgtattgcgtggttgcctcaaaaagagacactttatccgtggttgtcaattgtcgataacgtgcagttgcaagcggtcttatttgggcgaaaatctgcaaaaaccactgaaaaagctaaaatgttgcttgaaaaagtgggaatggcagcacattggcacaagccttgttcgcagctttcgggcgggcaaaaacagcgggttgccttggcacgcaccttaatgcaagaggcggatttgattttgcttgatgagcctttttccgctcttgatgccatcagtcgccatcaacttcaagatttagcctttgaactgctagaagataaatcagtgctgctcgtgacccacgatccgcaagaggcattacggctaagtcagcgtatttttgtgttgcgttcgcctgaatctcatcaaacagcattatcggcggtgattctgcccgaaggtaacgcccctcgtgagttgcatcaagccaatttatgggcgttgcagcaacaattattgcaggaattagggggcgaacaatgaaaattcgcctacttaaaccgcttttaattgttggcgtgttgttgatgatctggcaaatggtcgcaaccttgggcagcttcccacactacatttttccctcaccgcaagctgtaaggcagcagttattcacacacgctgaactgctttggcagcatacgcaagtcacgttgttagaaatctgcttagggctgttgttaggctttctatttgggttgatttcggcattgttgctctcattttctcgtcaaatttctgccgtcttattgccgattttggtcatttcgcaagcgattcccgtgtttgctattgcgccgttgttggtgttgtggtttggctatggaatggcatccaaaattgtgatgtcggtgctgattatctacttccccgtcacggcagcttgttatgatggactacgcaacaccccacaagcgtggctcgatttggcgaaaacctttaacatttcccccttgcgtttattgcttaaagtacgattacctgcggctttgcctgcttttgcttcgggcttgcgaattgcggtttcggtcgccccgattggtgcggtggtgggcgaatgggtaggttcgtctgaaggcttggggtatttgatgattcacgccaatgcccgaatgcaagtcgatttaatgtttgccgccttactgattttagtgtcaatttcactctgtttatatttcagcattgattggctattacaccgttttatttggtctgtttaacttttcattaaaggagaaaaaatgaagacaatcatccgttattttagctttgtaatggggctaatgctcacgcttcctagctttgcaaaagagaaaatcagcgtaatgctagattggtatgtaaaccccgatcatgcagccatcattgtggctcaacaaaaaggcttttttgaaaaaaataacttggaggttgaaattaccgaacctgctgatcctgcattaccgccgaaattagcggcggcagaaaaagttgatttagccgtgagttatcagcctcagctttatcaacaagtggcagaaggcttgcctttagtgcgagtgggttcactgatttcaaatccattaaatagcgtagtggtactaaaaaagagcaatttgaaaagccttgctgatttaaaaggtaaaaaagtggggtattctgtcagcggttttgaagatggattacttaatacaatgcttcattctattggtttaagcaataaagatgtggaattagtgaatgtaaattggtcgctttcgccctcccttttaactggacaagtggatgctgtgattggtgcatttcgtaattttgaactcaatcagcttgctttagaaaatcaagaaggtatcgcattcttccctgaacaatatggcgtgcctgcttatgatgagttgattttagttgctaataaaaacagcgtaacagataaaaaaacatcggcatttttgaccgcacttgaacaagccacaagctatctacaagctcaccctaatgaagcgtggcaagcctttgtcagctataaaccgaatgaactcaacacgccattaaaccaactggcgtggaaagacactctccctttcttagccaataaacctcgccaattagacgctaaacgttatcaacaaatggcagaatttatgcaacaaaaaggcttaattccaaaagccttagcgttgaaagaatatgcggtagaaattgaataaggaaaaaagatgattgaacaactcattcaacaagctcagccttattggcaacaatatattgaacacgaatttgtgcaacagctcgcaaaaggtacgctaccaaaagcttgttttcagcattatttaaagcaggattatctctatctttttcattacagccgagcctttgccttaggtgtattcaaggcaaaaaatttcgctgaaatggaaacacctcgtaaaaccttagagattctttgccaagaaattcaactacatttaaattattgccgtgagtggggaattagtgagcaagagatttttgctactcaagaaagtgccgcttgcattgcttatactcgctatttgcttgattgcggcatgacgggcagtttggctgagctttatgcagctgtaaccccttgtgctttgggttacgctcaagttgctcgttacattactcagcattatcctcgcttaccgaacaatccttatcaaacgtggattgatacctatgcgagtgaggaatttcaacaagccgcccaagaaaccgttgattttcttaccgcactttgcaaaccactaaacccaagccagcttgctgagattcaacagattttcaccaccgcaactagaatggaaattgcgttttggcaaatggggttggattttgcttaggcttagattggcgattagacgaatgactttatttatctccaaacggataaatttattgcgattttctacctcctctttgagaaaagaggggtagaaaaattatcttattctaatcttgctataagctaatgctataacaaaaaatgcggcttgcagaagaataatacaagcacctgttgaggcatcaaaatgatagctcaagattacgccaattaggcttgatgtaatggaactgacaatagcaatccatagcattttatcaaaagattttgttagcgtaagtgcagtaattcctggtgcaattaacattgccaccaccaaaataacgccaaccacttgcatcgtgcttacaatagttaaagcaagcagcattaacaaaccataatgtaaaattttaggagaaagccctgcaacacgggcgtggtttgggtcaaaacaataaagcaaaaagtctttacgtttaaagacaatcagacaaaaaattattgcagaaatgaccgcactttgaatcagctcttgatgacttacacccaacacattaccaaacaaaatatggcttaaatgctgttctgtttgaattttggtaaacataaccaaaccgatagcaaacattccagaaaatacaatgcccattgcggtatcttcttttatacgactattttcttttaaatatcccacaccaagcgagcaaaaaatgcctgaaaaaaatgcgccaatcgctaaagggattcctgccaaataagcaagtacaataccaggtaatacagcgtgagaaatcgcatcacccattaatgaccaacctttcaagactaaataacaagaaagcaacgcacaaataattgaaacaatcaatgcggtcaataaggcattttgcataaactcaaattgtagcggttctaaaagccaatcaaacattttctaccgcctttttattacgagtgagtaagccatattttggtgaaaacaagaaggcagccaagaataataatgtttgcaatgtcacaatcacaccgcctgtggcaccatctaaataatagctaatatagactccaacaaaacttgtcaccgcccctaaaataatggcgatgattgacaaggttttgaatttatccgttagtaaatatgctgtcgcacctggggtaatgaccatcgcaatgactaaaatcgcgcctacagtttgcaaggcagctaccacacaagcacttaataatgtgaaaaataagattttataaaataatggggaaagaccgactgtaatcgcttgagtttcatcgaaaaaaatcagcagtaaatccttccaaaataataaaagtaatactaaacaaacaccgataataattgccacttggtaaatatcttcatcggcaatgcctaaaatattacctaaaatgatattttgcacatttactgctgttggatttaaagaaatgattaacagacctaatgcaaaaaaagtactgaaaataaatccgataacagcatcttctttcaatttagaaatggatttaatccaaagaatggaaagtgcggctaaaattccggcaaaaaatgcgccaagtgcataaggcaacgcaaaagcataggcaattgcaacaccgggtacgacagaatgggaaagtgcatcaccaattagagaccagcctttaagcattaaatatgaagacaaaaaagcacaaatgccacccactgcggtactcaaaatcatcgccttgagcatataatcataggaaaaaggttcaagcaataaatctaacattacctaatccctcttatttttaactgcacttttataagggcaatcttcaaaatgacaattttgtgttgttggcgcaggtggatcttgcttagtttcgccatagaatacaacggctttttcatcatctgttaagacggtaacagaacgtttatcttcatcattatgtaaattttcgcccaataatttaatatgacgcaacaccccaccaaatacaatttccaaattatgttggttaaaggtgtcttctgtttttcctgcggcgatgactgtgcgattaatcatgaccacttgatcacaaaaatcaggaacagaacctaagttatgggttgaaacaagaatcagatgaccttcttctcgaagctgttgaagaagatcaacaatggcattttcagttttcacatcaacgccagtgaaaggttcatccaataaaataattggactttgttgtgctaaagcgcgggccaaaaacacgcgttttttctgcccgccagataactcgccaatttgacgatgcgcaagatgctcaatatttactcgctgcatcgcctcttgaactttttgtttatcaatcgctttggggatacgaagaaaattcatatacccataacgtcccatcatcacgacatcatacactgacaccggaaattgccagtccacttcttctgattgtggcacataagcaaccaaattacgtttcagtgcttgggaaattggcaaatcacaaagtttaatttcgccttgttgtggctttacaagccccattatgcttttaaataatgtggacttgccacttccattcacgccaactaacgcacaaatagttccactattgagtgagaacgtcatattgtgaatagcagtatgaccattgttgtaacgaacagttacatcattaacccaaattgatgtcgagaaagagtccattattttccgaatcctttaacaatagttgatacagtgacgttaagcaaatcaatataagttggcacagggccgtttttcgcagaaagtgaatcaacgtacaatacgccaccgtattttgcaccactttctttagctacttgttgtgcaggtttggctgaaattgtactttcactaaacacaactggaatattgtttttacgaactaaatcaatcactttacgcacttgttgtggtgtgccttgttgttcagcattgattggccataaataaccttcttttaagttgtaatctttcgccaaataactgaaagcaccttcacttgttacaagccagcgttgcgcttctggaatttgtgctaattttgcacgaagcggttcatcaagttgtttaattttttgagcatagtcagcggcatttttttcatacacagctgcattttgtggatcgtatttcactaacgcattcttaatattttcaatataaattaaagcattagatggcgacatccaagcgtgtggattaggcgcatctttatacgggccttcataaatagataatggttgaataccttctgttactaccacagcaggtttatctttaacattttggaagaaacgctcaaaccaacgttctaaatttaagccgttccataaaattaaatcagcagattgtgcttttacaatgtcttttggcgttggttcatattcgtgaatttcagcacctggtttggtaatagattccactgttgccgcattgcctgccacattttgcgcaatatcttgaatcacggtgaaggtggtaacaactttgaattttgcattagcttgcattgcaaataaaccaagtgcaagtgcggtcataattttgaatgaatttcgcataagatgtccttatttaaaaaagatagattgaatgcctgaataatcgttcaacagcacaacaattattcatcggaaataatagtactactttttatgttgttttggaatggaaatgattatcaaaatgatagatttatttataattatttcgtacaaaatgtattgaatgtatgaaaaaagaacaaaacattttggttagtattaagttcagcaatagtcttggctgcttgtgatgataaacctaaaatgacagaacaaaccaaaacaactgaccaagaaaaagtcactgtagaacagcctgctcatcagctaaaaaacgcgagataaaacaaactgttatcttgcgtttttatatttacgaacattattttgataatttctgaattagcgtattaaatcccacttcatcatagccatcttcatattgggcttctcctgctacatcacgaattgttcttccatttaatgccgtgcagccgaatttttctaatttgcttttagtaaaactagaacgatacgctgaggaagtgttatttaaactaattacgccaatagttgcatttttgcatgggtgtttattgatgaaaacaaggttataaccagattcttgaatgtagcctgttttatttaccacagcatcaaaaatttcatcacgcactaacttattagtatttttaatataaagcttgtgtttccctgcttggatataagttgcactaagattagataaacgtttaatgtccgatttatttaatgaatatttggcgagcttaactaaatccattgggctggaaatattatagctagataatcctgaactatcgtgaaaacgagtagaatacataccaagttgatgggctttttcgttcattttcttaataaattggcgacgacttattcccgctgcacgagaaagcgcgtgggcggcatagttatcagaatggacaagcattgctttcaataattcgttacaagagataggaatatttttaggtaattttgttccagtacctttaattcgatccgtatcctcttttgtgattgcgattcgacaattaggatttttattattctctaaaaatacattagccgtcattaattttgttacagaggcaataggctgaatactatcagacgcgtggctttccaacactcgattatgggtaaaatcatacacaacataagactgtgccagtgcaaaagaaggacacaaagataaaataaataaagcttttttaaacattattggtcaccttagaaaataggctgatattttaccgcactttttccgctgtaattgaaaatatttgcgatctagatcgcaaaaaagtgcggtaagattttctatcgtttttcaattccgctagattatgcggtgacaaatctgtacaatcgccgttcattttttaattgcgaatttttcgttgtgagtttttgataaaaacacctgcacaatgctatcgccacaatgtgtaataacgaggctaaaatgtcagaattattgtcagtgcaatcagatgcacccgctaaaaaaattaatctaatggatttaacgcgccaacaaatgcgcgaattttttaaagaactcggcgaaaaaccatttcgagcagatcagttagttaaatggatttatcattttggcgaagataacttcgacaatatgacaaacattaataaaaaattacgtgaaaaacttaaggcggttgcagaaattaaagccccagaagttgccgttgagcagcgttcagccgatggcacgataaaatgggcaatgcaagtgggggaacaacaagttgaaactgtgtatattcccgaagcagatcgcgcgacgctttgtgtatcttcccaagttggctgtgccttagcttgtaccttctgttcaaccgcacaacaaggctttaaccgcaatttaacggtttcagaaattatcggtcaagtatggcgagcctctaaaattattggcaactttggcgtaactggcgttagacccattacaaatgtggtaatgatgggaatgggcgaacccttattgaatgttgctaatgttgttcctgcaatggaaattatgttagatgattttgcctatggtttatcaaaacgtcgtgtaaccttatcgacttctggtgttgtgccagcattagataatttgagcaaaatgatcgatgtggctttggctatttcattacatgccccaaacgatgaattacgtgatgaaattgtgccaatcaacaaaaaatataatatcaaaacattgattgactcggtaaatcgttatttgacagtatcaaatgcaaatcatggcaaagtgacgattgaatatgtgatgctcgatcatgtaaatgatggcgtagaacacgctcatcaacttgcagaagtattaaaaaatacgccttgtaaaattaatttaattccgtggaatccgttcccagaagcaccttatgcaaaaagctcgaatacgcgcatcgatcgcttccaaaaaaccttaatggaatatgattttaccgtgattatccgtaaaacccgtggagatgacattgatgcagcttgcggacaattagcgggagatgttatcgatcgtactaaacgtacggcaatgaaacgccaatttggacaaaatattggggtgacagaagttaattaatattctaggtatgtgaattaatcaagttcacataccctatgttttcatacaaattaaagcatattaaatatttcttcctgcccagttaaaaggagaaaaaatgaaaacaataagtaaacaactaagtgcggttatttttccttttattttttctgcctgcgtttcacaatctgcatctaacttaaatcatcaagctgccgctaaagctcgtgtggaactcgctttgagctatcttcagcaaaataatcctcaactggctaaaatcaatttagacaaagcacttcaacacgataaaaattactatctcgtgcattcagcacttgcacattattatcaacaacaaggggaaatagagaatgcacatcgtgaatatgaaatagccgtaaaccttaatcataaacaaggcgatgtgcataataattttggtacgtttctatgtagtcaaaagaaatttgaacaagcccagcaacaatttgaattagcacttaattcgccgaattattatcatcaagcagatacatttgaaaatattgtgctttgtgcttattccgcgcaaaaaatggatatttatcagcaaactttagaaaaattacgtcaaatcgatggaaaacgtgcggaaaaattcaatagtctaaaataaagcattgccaaatcaagtattggactttaaaatttagcctccatttaccgcctaattatttgattaaatttatgaatccaactactgagcaagtgctttcccctggtgagatttttcgtcaaacacgcgaatccttaaatctttctcttgaagatgtcgctaaagaaatcacgctacgcccttctatattagagcaacttgaaaataatgaatttattcaaaaatctacccctgcaatctttgtaaaaggttatgtgcgtagctatgcaaagttcttacgtttgccagattctgtgtgggaaaatattgtttttgctgaaacagaaaaaaatgatttagggaaaaatgcacgttcaacccgtgccgttaatcaatattcctctcacaatcgttggatcgggcgtttaaccgcaatagtattcgtgattgtaattggtatgactgggctttggtggtggcaaagttatcaacaaaatactcaagaacgcgatgatttagtgcaaagctatgttgcctctaccgaaaacaatcagcccgccaccgctcttgtgacaacagaagaaactaataaatctgcaccagaaacagcagcaccagtctcacaaccagtagaaataacaaataatcagttaccagaaatagcacaagaaaatagcgtttcacaacccaaaaacgatgaaaaatcagtttcagacattcaaagtgcggtcgaaaatccaagtatttctccaacgttacctatagcaaaaggcgatttagtgattgaaatactaacaaatagcagttggattagtgtaaaagataacgctcgccacgtattagcacaaaaagaatataaacaaggcgaaatattaacctttaatggcaatgaattttcattaattgtaggcgcgccaagcaatgtgcgtatcacttacaaaggcgagaattatcctctgaaagtggatggtcgtgtagcaaaattcaaactttcacaaccttaggaaaaataatgtcagcttttcagccaactattaagcgtcgtgaatcgacaaaaatatatgtgggaaatgtaccaattggtggggatgcgcctattgccgtgcaatcaatgacaaatactcgcaccactgatgtggaagcgacagttgctcaaattaaatcattagaacgtgttggtgcagatattattcgtgtatctgttccaacaatggatgctgcggaagcatttaaacaaattaaacaacaagtgaatgtcccgctcgtagcagatattcatttcgactatcgtatcgcattaaaagtcgcagaatatggagtggattgtttacgtatcaatcctggcaacattggtcgtgaagatcgcgtccgtgccgttgttgattgtgcgcgagacaaaaatattccgattcgtattggtgtaaatgcaggctctttagaaaaagatttgcaagaaaaatatggcgaaccaacgccagaagccttgttagaatccgcattgcgtcatgtagaaattctagatcgtcttaacttcgatcagtttaaagtgagcgtaaaagcctccgatgtattcttagcgattgaatcttatcgtttactggctaaagcaattaaacagcctttacatttaggcattacagaagcaggtggtgcacgtgctggtgcagtaaaatctgcagtgggtttaggaatgttattagctgagggcattggcgatacactgcgcatctctttggcggcagatcccatagaggaaatcaaagtcggttttgatattttgaaatctttacggattcgttcaagaggaattaactttattgcttgcccaacctgttctcgccaagaatttgatgtaatcggtacagtaaatgcgctagaacaacgccttgaagatattattacaccaatggatgtatctattatcggttgtgtagtgaatggtcctggcgaggcactcatctccgatctgggcgtaacgggcggtaacaaaaaaagcggttattatcttgacggcgaacgccaaaaagagcgttttgataacgaagatatagtgaaccaattagaagcaaaaattcgtgcgaaagtcgcacgacaagatccaaaaaacagaattatttaaggaaagctcgtggcaaaaacaattcaagcaattcgtggtatgaacgattgtgccccaacagaatctccattatggcaatggattgaagcacaagtacgcaatgtattaaatagttatggctattctgaagtgcgtatgccaattgtagaaagtacgccattgtttgcgcgtgcaatcggcgaagtaactgatgttgtctcaaaagaaatgtacaccttttgggataacgatgaacaattaaccttacgccctgaaggcacagcaggttgtgtgcgagcagccattgaacacggttggatctataataatgaacaacgcttatggtatatcgggccaatgttccgtcacgaacgtccacaaaaagggcgttaccgtcaattccatcaagtaggtgttgaggtattcggtattgcgaatccagaaatcgatgccgaattaatcatgcttacctaccgtctatggaaagcattaggtatcgatcaacatgttacacttcaacttaactctattggctctttagaagctcgagcaaattatcgttcagctttagttggattcttagaaaaccatcaagatttaatgagcgatgaagaaaaagagcgtttagtaagaaatccgcttcgtattttggatacaaaaaatccagaattacaaaaagtattagataacgcgccaaaattacttgattatttagatgatgaaagccgtgcgcattttgaacaattatgttcattattagatgcagtgggtattcaatatgaaattaatcctaaactcgttcgtggtttagattattacaacaaaactgtatttgaatgggtaacctccgctcttggtgcacaaggtaccgtgtgtggcggcggtcgttatgacggtttagtggaacaacttggcggacacgcaacgccaagtatcggatttgcgatgggattagagcgtttagtcttgttggtacaagaagttaatccaaatattcctgcgaaaagtgcggtggatatttatgttgtttatcaaggcgaaggcgcaacattagccgcttttgaattagcggaaaaagtacgctcggaattaccgcacttaaataccatgttgcactgctctagcggtaattttaaaaaacaatttaaacgtgcagataaatctggtgcaacattggcattagttatcggcgaaagcgaagtacaaaataaacaagtcgttgttaaacacttacaaggtggcacagatcagcaaaccttagatttagtgaatataatcgactatcttcaaactcaattttaatttaaaaggggaaaaacatggcttattccattgaagaagaacaagagattaaccagttaaaagactggtggaaagagaatggcaaaacaattattgtcgcttttatcttaggtgtgggtggtatgtttggatggcgttattggcaaacccaccaagtagaacaaatcgctcaagcttctgcacaatacgatactttaattaattctgtgcaacaagacgaacaggctaaaaaagcaaatatagaacaatttgtgcaagcgaatagcaaaactgcatacgctgtatttgctttgttagatgaagcgaaaaaagccactgaaaaacaagatttttcagcagcagaagcaaatttaaaccaagcattaacccaatctcaagatgaagtattaacatctattgttgcattacgtctcagtgcagtacaatttcaattgggtcaattagacaatgctttaaccaccttaaaccaagtgaaaggcgaaagttttaatgctcgcaaagcgattttaactggcgatatccaagttgcaaaaggagataaagttgcggcgaaaaacagctttgagcaagcacaacaaagtggtagccaattagaacaacaaatggcaaaaatgaaattaaacaacctttaaaaaataatacccgcatcaaagtgcgggtattttttcaatcaaatttctgattattcaaattcatctaaccattttaataaaatagcctcaagaatcgcttcatttgacttattcggatcgtcatcaaaatcttcaagttcacaaatccatttatgtaaatcagtaaaacgaactgtttttggatctaaatctggattacgatcgtaaagttcttctgcaattaattgggcgtctgtccatttcattagtgagccgcctcatttgcgtgattaaggttatattttggaatttctaccacaagatcttcatttcccacgacgcattgacaagataaacggctatccatttctaatccccaagccttatctagcatatcttcttcttgatcactcgtttcatttaaagaatcaaacccctcacgaacaatcacgtggcaagttgtacaagcacaagaaccatcacaagcgtgatgaatttctactcccgcattgtgagcaacttctaataagttatctcctgttgcagcatcaacgaccataccttcaggacaaaaatcttcattaggtaaaaaaatcacttttggcataatactttcctcaaaattatttaatatctgactgcagttttacggattttcaatgtctgacagatttttacctgtcaaagctttattaattgatgcattcattcggcgagcagcaaattcttgggtagcagtgtctaaggctttaattccttgcgcaattgcatcgcgatctgaaccttgttttacatccattaattgttttaacacagtttcaatatgatgaaattcatctgtgctaagcaattcagccccatctgcttgtagtgcaacaatcacgctttcaataacacgatctgcttccacacgctgctctgccaattcacgtgcttgtaaatcttcttgtgcattatcaaaagaagatttaatcattgcggttacttcttcatcagttaatccataagatggtttaatttgtattgaagcctgtacttttgtcgatttttccatcgctgtaacgcttaataaaccatctgcatccacttgataagtcactctaatatgggctgcccccgccgccattggcggaatacctcgtagagtaaagcgtcctaaagaacgacaatcatcgactagctctcgttcgccttgtagcacatgaacagtcattgccgtttgcccatctttaaaagtagtaaactcttgcgcacgagccacaggaattgttgtattacgtggaataattttttccactaatccgcccatcgtctcaatgcctaaggaaagcgggacaacatcaagtaataacatatcagaatcagttttattcccgactaaaatatctgcttgaattgcagcaccaagtgccacaactttatcaggatcgattgaggttaatggtgttttaccaaaaaactcgccaacttgttctcttacataaggcacgcgagttgaaccaccaaccattactacggcttgcacttcttcggattccacattggcatctttcaatgcccgacgacaagttagcaatgaacgttttacaagcggataaattaattcattgaattgttcccgcgaaatctctactgaaaaatcttgccaagaaataaccgcacttttttcattagtcaaggtaattttagcttggttggcaagggttattagctcacgctgttgatttgctgtttgtggttttagcttagtttgttctattatccaatctgcaattaaatgatcaaaatcatctccacctaatgcagtgtctccccccgttgctaaaacttcaaagataccttttgataagcgtaaaattgaaatatcaaatgtgccaccgcctaaatcataaaccgcaataatgccttcttgcccactatccaatccataagcaagtgcagctgcagtaggttcattcaataagcgtaatacatttagcccagctaaacgcgcagcatctttagtactttgtcgttgagcatcatcaaaataagctggaaccgtaatcacaaccccagaaagctcacctccaaggcgttgttctgcaatgtgatttaagcgcgataaaatatctgaagacacttcaattggacttttaggcccctgtgccgtaataattaaaggtaatccattttcactcgccacaaattcataaggcaaactagaataacgagactgaacatcagaaaggctgcgaccaattaagcgttttactgaaatcaccgtattttttggatcaagtgaggcttgttcaaaggcttctaaaccaactttcttctcttcaacgccataatgaacaactgacggcacaagactgcgttcttgttcatcattaagaatcacggattgcccgctacgcacggatgcaaccaaagaattggttgttcccaaatcaatcccaacggctaaacgatgttgatgcggtgccgcagcttgtcctggttctgcaatttgtaataatgccatatgctatttttctactagttatgcgacggaatacgccaaatcaaatttatttttttctgcaaagcttgcttggtaatgggtttcaatattgacttcctgtttttgacgttcatcaattgctatttttctgtcttggtttaaatcaggcgtaaatacaaaaacttggttaccatctaattgttttacatcatcttgccaatttttccaaaatagcccttgataaaaggcctctacatcgccattcaatgcccaagctaaaaattctgtgtaagtaaaatttaaattatgccaagtaagatcttttgatgaatagtaataaatttttccaatattattgcctaacgaaccaccatttaacgcaaaataaccaccaatcacatcatctgcaactaataaatattttggtttttcgcctgactcactaaaagatttactgaaattccaatccatcaagccacgcggtaatttaaaacttccagaacctaaaatacgtaaccaaccataatgaattaaaattccacctgtttcatagattactgcacccattggcgaggatgttggcatttgcatagtaaaaagctcacgctccgcactggattgatcttttttaattacttcacaatgattgcgaacgttatcaatccattgggaaagggttatccaagcagaatgttctggactagtgagctgttcaagagtttgcatagtgttatttattcacatctcgtaggggcaaattacatttgcccctacatttaatctaattcaaaaattcgttcttccacacgttcaatttcttcagaaagtttatgggtaaaacgtaatttatcacagtattgagatgctctcgcccattgttgagatttcaaactctcaaaaagtgcggtcaataatgattgagtttcttgtttaatttctttcgcaaaagcatttaatgctctttcatctttctggctttcaacttcttctaattgttcgcgccactgtaactgttgcattaaaaacgccacatcttgcgtgcttttttgttcaagatctaactgctcaccagtattaagagcaatgatcgcttcagctcgcaaaattgggtcttttaatgtttttaaggcatcattcacttcggtagatttttgcatcgcaacacgttgatctaaagcactacttgagacaaaattatctggatgtagggccttttgtaattttaaataacgtgcatttagtactttttcatccagctgaaaatcaactggcaaatcaaaaatttgaaaaggattgaacatcagattattaccttaaacgtggaaactttcgccacaaccacaagattcttttacatttggattattatatttaaagccttcatttaggccttcttttacataatccagctcaatgccattgagataaacgagactttttggatcgacaataatattaacaccgtgctgctcaaaaacttgatcctcggaatttaaaacatctacaaactcaagtacataagctaagccagaacaacctgatgttttcacacctaaacgtaatccaatacctttaccacgattatccaaaaaggctttcactcgctgcgctgctttttctgttaatgtaatacccatctatcccccaacaccgctaaaaatgcggtcaaaattgaccgcactttttcacatgattagccttgttttgctttataatcagcaattgctgctttaattgcatcttctgctaaaatagagcaatgcactttcactggcggtaattctaattcttcagcaatttggctatttttaattgctccagcttcttctaaagatttaccttttacccactcagtaattaatgaactagatgcaatcgcagaaccacagccgtaagttttgaattttgcatcttcaataatgccattatcatctactttgatttgtagttgcataacatcaccacaagctggcgcaccaaccattccagtaccaacattgctatcttttttatccaatgatcccacattacgtggattttcataatgatcaattactttttcgctataagccattttaactttccttttttcaattctagtgaatgccattgtcagataatggcaactaaatattagtgagctgaccactcaatggtatttaaatcaataccttctttaaacatatcccataatggcgataatgcacgaagtttttctaccgcgcccttcattaaattaattgtgtaatcaatttcttcttcagtagtataacgacctaatgtgaaacgaattgaactgtgcgccaattcatcatttaagccaagtgcgcgcaatacataagatggctctaagctagcagatgtacaagcagaaccagaagagacagcaatatcgcgcaacgccatcattaaggattccccctcaacatagttaaaactaatatttaaattgctatctaaacgatgttccattgaaccatttacataagtttcttcaatatcttttaagccattatataaacgatcacgaagtgcttttaagcgcggcatttctgatgccatttcttcttttgcaattcgatatgcctctcccattcctacgatttgatgaacaggtaatgtacctgaacgcataccacgttcgtgaccaccaccatgaataatcgcctctaaacgtacgcgaggtttacgacgaacatacaatgcgccaacaccttttggcccataaagtttatggctagacatcgacattaaatcaacagctaattcttccaaattaatttcaactttaccaacactttgagttgcatccacatggaaaattgttttatttgcacgacaaagttcgccaatagctttaatatcttgtaacacaccaatttcattattagcgtgcataattgaagctagaattgtatctggacgaagcgcagctttgaatttttctaaatcaattaaaccatcagcttctggagacaaataagtgacttcaaaaccttctcgttctaattgacggcaagtatctaacactgctttatgttcagttttacaggtaagaatgtgtttacctttagtttgatagaaatgcgccgcacctttaatagcgaggttgtcagattctgtcgcaccagaagtaaagacaatttcacgagaatctgcaccaatgagatcagcgatttgattacgcgcaatatcaacagcttcttctgcttgccaaccaaatttatgtgagcgagaggctggattaccaaatgtgccatcgatggttagaaacgccatcatttttttcgcaacacgttcatcgactggacaggtcgctgcgtagtctaaataaataggtaatttcattttcactcctaaattatgctaaatataaccgcacttttttattaaaaaatatactgcttatcttttttattgattaactaataaattattaaaatcacgatgagattgacgttttacattacgcttatttaccagctctgctaacgtaatctcatttaaaaaactttcaatacgtaaacttaaatcttcccaaagtttgtgagttaaacattccacaccatttttacaattttcacgccccagacatttcgttacgtgaatattttcatttactgccgcaataatcattcctacagaaatttgttcacttggtagccctaactgataaccacctcctggcccgcgaacacttttgactaaaccgtctttacgtaatttagcaaaaagttgctctaaataagataaggaaatatgttggcgttcagaaatatccgcaaggcttacaggcccgccatctgcatttaaagcaatatctaaaacggctgtaactgcataacgacctttcgatgtaagtttcataaagaatccctaaaaattaattgcgcaatacttacatatctgactaatttagtcaattatcctcttttgttaaatcaattcgtttttcaaccgcacttagcatgccatttaaaatatttaattcgtttttctctaattttgcacgatagtataaacgctttaatttacgcataactccttgattttgaataaatccaagagactgatatatacgttctgtgtagtcaaaaaaataagctaactgatctgttgttggatagtttttctctattaaagaaagtgaatttttcttattattttgaactaagaaagccatacgcaattcataacttaccagttgcacagccattgctaaatttaaagaagaataatcaggattcgctggaatattcaagtgataatgacatttcagcagttcttcattggttaatccaatacgctcacgaccaaacacaatagctatcttgcctttatacgctacaactttctccgcgcattctcgaggctcgatcaatgtattttgtaaatgacgtaagcgagcacttgttccaattaccaaagagcaatcatcgacggcttcatcaaaactatcgacaaccctagcattttttacaatattttctgcgccagctgaaagggcataagattgttcatcaacagatttaggtgaaacaagacaaagctgggtcaatcccatcgttttcattgctctagccgcagaaccaatattaccactgtgcgaagtttcaattaaaacaatacgaatattatccaacataatgatgcccgactaaaatttaagggtattctaccacaataaccgctaaaaatagtcaagaatttaagcaaattaaagaaacttaaaatattagagatgaataataaaaatggtgggttgtgagagactcgaactctcgactgacggattaagagtccgctactctaccaactgagctaacaacccaactggacaactaaatcagagagtggtgggtcgtgaaggattcgaaccttcgaccaacggattaaaagtccgctgctctaccgactgagctaacgacccactgtattaatggatctatgataacgcatttgctctagaatcgaaagaataaattcattcgttcaagctaattggttaaattacaaacgatgaaaacaaaacagaatccaataaaaaatggatcctgtttttcaagtattagaaatactaagaattagtacgctaacactgcacgacggtttttagaatatgcagcttcatcatgacctaatactgcaggtttttcttcaccgtaagatactgtgcctaatttaccagcatcaacacctttaccagctaaataacctttaactgcatctgcacgacgttggcctaatgcgatgttgtattctggtgtaccacgttcatcagtgttaccttctactaatactttagcagctggtgttgcatttaaatatgcagcgtgcgcatctaagatttgaacgtattcaccagtaatgtcatatttatcaaaaccgaaataaacggtattgtaacgttgttgaagatcagcaacagagtaaccgccaaaagtttgagcagcaccattgcctgcagcatcgttgttagatgaactacaagctgctaatgcagctacagaacctgcaactaataatgatttaacaaatttgttcattagatttctcctaaatgagttttttatttagttaagtatggagaccaagctggaaatttaacttgaccatcacttcctggaaggctcgccttaaagcgaccatctgcagaaaccaattgtagcacctttcctaagccctgtgtagaactataaataatcataattccatttggagagaggcttggactttcgcctagaaaagatgtactaagtacctctgaaacgcccgttgtgagatcttgtttaactacattattgttaccattaatcatcacaagtgtttttccatctgcactaatttgcgcgctgccgcgaccacccactgctgttgcactaccaccgcttgcatccattcgataaacttgtggcgaaccacttctatcggatgtaaataaaattgaatttccgtctggcgaccacgctggttcagtattattacccgcaccactcgtcaattgagtaggtgtaccaccatttgcgcccataacgtaaatattcagaacaccatcacgagaagaagcaaaagctaaacgagaaccatctggcgaaaaggctggtgcgccattatgcccttgaaaagatgccactactttacgtgcgccagaatttaaatcctgtacaacaagttgtgattttttattttcaaacgatacataagccaaacgctggccgtctggagaccaagctggagacataattggttgggcactacgattgacgataaattgattatagccatcataatctgctacacgaatttcataaggttgcgaaccgccatttttttgcacaacataagcgatacgagttctaaaggcaccacggatcgcagttaatttttcaaaaacttcatcactcacagtatgtgcgccatagcgtaaccatttatttgttactgtatagctattttgcattaatacagcccctggcgtacctgatgcaccaaccgtatcaattaattgataagtaatactataaccattacccgatggaacaacttgtccaattacaattgcgtcaattccaatattcgaccaagcctcaggattcacctctgcagctgaagttgggtgttgaggcatttgagacaccgcaataggattaaacttaccactgttacgtaaatcatctgcaacaattttactaatatcttctggtgcagaaccaacaaatggcacgacagcgatagggcgcgcaccatcaaccccttcatcaatgacaatgcgtacttcatcgccagcgaatgcattgcttccaacagcaagtacaatcgctaatacgctcactaaacgttttaataatttcattttgttacctttaaaatttaacaataaatttttctaaagaattatcgaatatcaaagtcaataattggtgatttatatttttcataaatttcatctgatggcgcagctggaacttttttcgttctagccaccgcacttaatgcagctgaacaaatatcatcagagcctgaaattttttgataccccaagattgtgccatctcgacctaattgaattttaatacgacaaacctttcctgcaaaatttggatcttttaagaaacgacgttgaatctctttcttaattacacctgcgtattgatccccaaccttaccaccatcgccagagccaagtgcagcaccgctaccttgagttccacctttatttgtgtttccccctttagatgcactaccgccaccaatatctccgccatttaagaaatcatctaggcttgcttgatctgctttacgtttcgcttccgtagcagctttagcttctgcatcagcttttgcttttgcctcagctgccgctttcgcttttgcctccgcttcagcctttgctttagcttcagcagcggcttttgccttagcttccgcttctagtttcgccttagcttccgcttctagtttcgccttagcttccgcctcttgttttgctttttgagcagcaatttctgctgctttcgctttagcctcttcttcagcttgttttgccgcagcagctaaacgtttagcctctgcatctgcttttaattttgcagcttcagccgcttgtttagccctagcctcttcagcttgcttctgtttttccaacgcttcttgacgagcttgctcttgttgtttttttatttcttgctgacgttgctgttcttgctgacgtcttaactcttcttgtcgttgaacttcttgttgatgcttaatctcttcttgtcgttgaacttcttgtcgttgaacttcttgtcgatgcttaatctcttcttgattaggctcaggtggtttttcttccacaacaggttctgggcgtttttgtttatccgcttgcccttttttttgttgttgaatacgcccccattcctgagcagccgtaccagtatcaacaatcactgcccctattacatctccttcaccttctccaccacccataatttcaacggtgtgataaagcgaacttaaaatcaataagccaaacaagataaagtgcaaaaggatagaaatagcaaaagcattgattcctttcttttgtcgattattttgcacgtgttacctacttagctaaatgggatttgtcattaaacctacagatttaatgcctgcaagatgaagtaaattcaatgccttaatcacttcttcataaggtacttctttagctccgcctactaaaaatagcgtattattatccttatcaaattcctgtctagataattgagtaaccatttcttctgttaaaccttcttgacgttctccgccaatagaaatcgcatattttccaatacctgccacttcaagaatgacgggcactttatcttcattagaaacctcttggctttgcacagaatcaggcaattcaacttgaacgctttgactaataataggggcggttgccataaaaattaacactaaaactaaaagcacatctaaaaaaggcacaatattaatttcagatttaattgctttacgctgacgacgagccatatattcctctaaaattttaacttatttttaccgcactttttctttaaagtgcggtcaattttccctatttttagtgaggggctttaccaaaggcttgacggtgtaaaatcgtcgtaaattcatcaataaagttaccgtaatcttgttcaatggcattcactcgtaagcttaaacggttataagccattactgcaggaattgcggcaaataaaccaatcgcagtggcaatcaaggcctcagcgatacctggcgctaccatctgtaacgttgcttgttttgcaccacttaatgccataaaagcgtgcataattccccaaacagtgccgaataaaccaatataagggctaacagatgccactgtggctaaaaatggaactcgattttccaaactttcaatctcacggttcatcgcaagattcatcgcgcgcattgtgcctttaataatcgcttcaggtgcgtctggatttacttgttttaaacgtgaaaattctttaaatcccacgcaaaaaatttgttcgctgcccgttaatccatcgcgacgattagatagcccttcataaagtttatttaaatcttctcctgaccagaaacgatcttcaaacgtacgtgcttcttttaaggcattcgttaaaatacggctacgttgaatgataattgcccaagatatgattgagaaagaaatcaaaatcacaattaccagttgcacaacaatacttgcttttagaaaaagatctaaaaaattcaattctgcagtcattgcatactccgaaaaattattttaagtgatgaaacgccgctttaacttctttgggaaacgccacaggtttcatcttgcctagatcaacacaggctaccttaacagtagcctttgataacatcagggtgttgcgcatcagtctctgttcaaaaaggattgtagccccttttacttctgaaacctctgtttccaccataagtaaatcatccaattttgctgccacgcaataatcaatggcgagcgttttgacaacaaatgcgagttgttgttcctctagtaaggtttgttgcgtaaaatttaatgtacgcaaacattctgttcttgctcgttcaaaaaaatgcaaatagcgagcgtgatacactacgccacctgcatcagtatcttcataatacacacgaacaggaaaagaaaagcaattatccaacatattctcacccaattggtcgcaataaaccctgtattctagaaccagtttttgggataagcaagctatctatgaaaaaactcaataagattttattcattttaaaacatctaaaatttttaccgcacttttagcctgactagcaaaagataaggtaatgacaaatcatttttaacctttctcattgagcaaaatctattcaaaaaataaccgttctttaaaaatagcctctatgtaatcttaagccaccagtatttttattcttgatatttagcgtttctatgcgacaatctttgcggttatttactttaaaaatatgttttactagatggattacgaaaatcaaattgccaatattttctcactaaatggcgaattaagccaaaatatcaaaggttttcgtcctcgagctgaacaacttgaaatggcacatgctgtaggtaaagcaattcaaaataaatcttctcttgtagttgaagctggaacgggtacaggaaaaacctttgcatatctcgcgcctgctttagtttttggtaaaaaaaccattatttctacaggatctaaaaatcttcaagatcagctttttaatcgagatcttccagctattaaaaaagcccttaatttcacgggaaaaattgcgttgctaaaaggtcgggcaaactatctttgtttagagcgtttagatcaagtgattgctcaaggtgtgcttggagataagtctgttttagctgaattaagtaaagtacgaaaatggaataatagtactaaaacaggcgatttcacagaatgtatcgagcttgcagaagatagcccaattattcctcaactgacgagtacagctgaaagttgtttaggcaccgattgccctaattattcagaatgttatgtagcaagtgcgcgtaaaaaagcattaaatgcggatttggttgtagttaatcatcatttattttttgctgatatggctgtgaaagaaagtggttttggcgaacttattccaaatgcagaagtgattatttttgacgaagctcatcagttacccgatattgccagtcaatattttggtcaatctttaacatcacgccagctttttgatttgtgtaaggatattaatattgtttaccgcacagaacttaaagatatgcagcagcttggcacaacatctgataccttactgaaagtggtacaagattttcgtttattactgggtaatgggagtaatgttcgaggaaattggcgtgagctttacaagcaaagtgcggtgaaaaaatcctttgaattattacaagagaaaatagattttttatctgaagtaattaaattagcacttggtcgttcccaaactttagacagtatttttgagcgtgttgagtccattaaaatccaactcaaacgtttatctgaaacaaatattgtgggttattgttattggtatgaaggaaatggtcgccagtttggtttacatattacgccattgacagtagctgataaatttggtgctcagctcgaagcgaaagaagccgcttggatattcacatctgcgacattagaagtggggggaacttttaatcatttctgccaacgtttaggcattgaaaatgcgacacaaaaaattttatatagtccctttaattattctgagcagtctttgctttgtgtgcctcgatatttgccgaataccaatcaagtgaatacattaaattcactaggcgaaatgttattacccgtgattgaagcaaacaaagggcgttgttttgttctttgcacttcttattcaatgatgcgtggtttagcagaatatttccgtgaaaaaagtcatctttcgattttattacaaggcgaaacctcaaaaagcaaattactcgaacaatttataaaagaaacgcatagcgttttggtggcaacttctagcttttgggaaggtgtagatgtacgcggcgatgcactttctttagtgattattgataaacttccttttactgcgccagatgagcctttgttgaaagctcgcattgaggattgtcgtttacaaggtggcgatccattcaatgatattcaaattcctgaagcggtaattaccttgaaacaaggcgttggacgtttaattcgtgatgttacagatcgtggcgttgtgattatttgtgataatcgattagtgatgcgcaattatggcgaaacttttttgaaaagtttacctaactcaagtcgtacccgtgatctcaacaaagtgatacaattcttacaaaataagtaaacgagaataataatgcaaaatttaactttattggcgttggacacctctactgaagcctgttctgtcgctttattgtatcgtggtgagaaaacacatattaatgaactagcccaacgcacacacactaaacgaattttacctatgatcgatgaaattttggtaaattcgggtttaggtttaaatcaagttgatgctttagcttttgggcgtgggcctggtagttttactggtgttcgtgttggtgctgggattgcacaaggtttggcgtttggtgcggatttgcctgtcattccaatttcaaatttaaccgcaatggctcaggcagcatttgaattacatcaagcagaaaatgttgttgcagcgattgatgcgagaatgaacgaagtctatttttctcaagtagtgagagaaaaagtgcggtcagattttggggaattttttcaatggcgagaaatcattagcgaacaagtttgttctccagaactagcgattaaccagcttcaaaatgataacgcatttagagtcgggacaggttgggctgcttattctcaatttactgaaaaaaatctaactggctcagatatagaattgcctaatgccttatatatgttagaacttgcgcaggtagaatacttgcaaaaacacacaatttcagctttagagattgaaccgatttatttgcgtaacgaagttacttggaaaaaattaccaggacgtgaataagtttaaataactggaggatagaaaatgaaaggaaaaatcaccttattttttaccgcactttgtttcggattaacgggctgtattgcaccaccaaaagggttagaaaaagagcgattctcaattaattcctatcgcgagatttctcctcaggatttgacctgtcattgtaaaacagttcgacttggaggaaaaattatcaatactaccgttttagcaaatcaaacaaaaattgaagtgttaagtttacccgtatcatcaatttcaggtaaaccatttgttgaattgcaatccgatggtcgctttatcgtgtatttcaacggttttgttgagcctgaaaatttaaaagaacgttatattactgtaggtggtcaattagctggaacagagaaaggcaaaatagaacaagctgattatacttatcctgttgttcaagcggataaataccgtatttggacactcagtaccatctatgagtatccaacagatgattgggatgaagatgatgattggggattttttagatggagacatcgcccttggtatgttcagcctgaaattcactattatttgaattaaatgataaaatcttaaagattttccaacaaattaggataaaaaatggaaaaaatttggtttcaaaattatccagaaggttctgaaaaatttttggatacctcaaaatatgaatctattttggatatgttcgacaaagcagtgcgcgaacatccagatcgccccgcttacattaatatggggcaagtacttactttccgtaaattagaagagcgcagtcgtgcatttgccgcgtatttgcaaaatgaatttaaacttcaacgtggagatcgcgtggcattaatgatgccaaatttattgcaatatcccatcgcactttttggtattttgcgggctggcttaattgcagtaaatgtcaatcctctttacacaccgagagaattagagctccagttgcaagatagtggtgcggtagcgattgtcgtggtatcaaattttgcttctaccttggaaaaagtcgttttcaataccaatgttaaacacgttattcttacccgaatgggcgatcaactttcttttggtaaacgtactttagtcaattttgtcgtaaaatatgtgaaaaaactggtgccgaaatataaattaccgcacgcagtgacgttccgagaagtattgagtattggtaaatatcgccaatatgttcgtccagaaatatcgcgtgaggatttagcctttttacaatacactggcggtacaactggcgtggcgaaaggtgcaatgctaacgcacggaaatattataaccaatgtcttccaagcaaaatggattgcagagccatttattggcgatcattctcgcactcgttcagctattttagccttgcctctttatcacgtatttgccttaacggtaaactgcttattatttttagagttaggtgtcacggcgatcttaatcaccaatccgagagatattgaaggatttgtgaaagaattgaaaaaatatcgttttgaagcaatcactggtgtgaataccttatttaatgcgttgttaaataatgaaaatttcaaagaagttgatttttctgcgttgaaactttctgtgggtggcggtatggctattcaacaatcagtggcaacacgttggcacgaattgacgggctgtaacatcattgaaggttatggaatgacggaatgttcgccattaatcgccgcttgtccgattaatgttgtgaaacataatggcactattggtgtgccagtgccaaatacagatataaaaatcattaaagatgatggctctgatgcaaaaattggcgaagctggcgaattatgggtgaaaggcgatcaagtaatgcgaggttattggcagagacctgaagcaaccagtgaagtgttaaaagacggttggatggcgactggcgatattgtcattatggatgaatcatatagcttacgcattgtagatcgtaaaaaagatatgattttggtttctggctttaatgtctatccaaatgaaattgaagatgtcgttatgctgaattacaaagtgtctgaggctgtggcaattggtgttcctcatgaagtttctggcgaaacgataaaaatctttgtggtgaaaaaagacgatagtttaactcgtgatgaacttcgcaaccattgtcgtcaatatctcaccggctataaagtgccaaaagaaattgagttccgagacgaactgccaaaaactaatgttggcaagattttacgtcgggttttacgcgatgaagagatcgcaaaacgttcaaaacattaatgtcaaaatgggatagcaatatcccatttttgttcttttcaaataaaaagtcactatgataaaagaatgtcaaaatccaccgcactttagagtcatttcagataatgctgcgctattagaagtttgtaatttggctcagatgaaaagtgcggtcgccttagatacagaatttatgcgtgtttccacttattttcctaagttgggattaatccaactttatgatggcgagcgcgtctctttaattgatcctttagcgattacggatttttcgccttttgtcgcattgttagccaatcctaaggtattaaaaatcttacattcttgtagtgaagatttattggttttcttacaagaatttgatcagcttccacgcccaatgattgatacgcaaattatagcgcgctttcttgggcttggcacatcagcaggattggcaaaattagcacaacaatacttaaatgtagaaatcgataaaggtgcaactcgcaccaattggatcaaacgccccctttctgatattcaacttcaatatgctgcaggcgatgtttggtatttgttgccactttatcatattcttgaaaaagagttagctaaaacaccttgggaacaagcagtaagagatgattgcgaacttgttcttgctaaaacgcataaattacaagagcgagattcagaaaaagcgtatttagatattccaaatgcttggaaattaaatccattagaattgtctcgtttaagaattttggcacagtggcgacaaaacgtggcaatagaacgtgatttagcactttcttatattgtgaaatcagaacatctttggaaagtggcaaagaataatccacgtaatacatctgaaatgttagaaatgggattaactgaaaatgaagtacgtgtacgtggtaaaaagattttgcaattacttgctcaagcaagacgtgtttcttctaatgactatccaaaacctattgaacgtatttctgaagatcctcgttataaaaaaacaattcgattattacaagaaaaagtgaatagcttaacaccaaaaggtttaacccctgaaatcgttgcaagtaaacgtactttggaagaattaattaaatgggtttggaaatatgattgttctcaagataaactaccagagttgctgattggatggcgaaaacctattggtgaaaagttagttgatgtacttaagtagatataaaaaagcgttgggcaaatagctcaacgcttttcgtttttactcgtagagttttttcacttgttcaggtgtcatcactcgttggtatttactaaattcttttgccatatagtaagcaccaaaatttgttaagtgatcttgatccccatacaagtattttccttctgccataacgctatcttttggtaaatactgttgagcatctacccaataaacattaggaatatctttgactaaatcataaataattttgttactcgcatcaatatcgcccattctacgaattggttccaaatatttttcaaggccatatttttctagtaaatatcctcgaacaggagatctactaatagaactgttatttgcaaagatataaactgattttgatttagccagtaattttacagtttcaacaaagcgagttttgaagttatcaataaaggaagcctgagcgttaaatcggggaacaggttgtcctcccattcttaaatcataaaatccagaaataaaaatagctttatatttaggtgaattaatctcatcaagtaacccttgacactcaggtgttattttattgtttttatccactaaaacaaaacaatccttcccatcagttatgcttaaaatagttgacttccatccttcttgcttaccaagatattttaaaaaataagtaagatgaccagcatgagaatcccctattgttaaaactgtagttgggaagttattctctaaattaacagataaaacatcttgttcaatatgttctttttcttttctaatctgttttctttcataagtgttataaccaataataaaaagagatggaattagataaagatagataaatgcctgtttaaagtttaattttgattttcttataggttgctcaattaaataataacttgtgatagaaaaaataatagttaatataacaacaattaaaactgtaatgccttgaatctgcttgctgccagtaatgtaataagcaaacgcaataaaaatccaatgatataaataaagagaataagaaatttttccaataaacactattgctttattagataaacataatttaacgatgttattttgtgatgtggtatgaataattaatgctgtaaaaatacaaggaagaattaaagtaatacccggaatatatgcaatattattattcattaaaaataagcagaaaaataatagtaatgtacttaatattgcaataacattgcttgcttgcttgcttgcttgcttgcttgcttgcttgcttgctgaaagattatgataaattgccaacaaagatcctacaagtaattcaggaaatcttaggttagagagataataaatattaggctgatgcaatacttctttgtaaaaattagctggaataaaagaggtagcaagtaaaataaaaaacaagattagcgttataataaataatactttaatttctctaaattttttataagctaaaattaggataagtggaaaaataagatagtattgttcttctacagctaatgaccaaatatgtaacacaggattttcattggcgcttaaatcaaaataaccttgtgttaaacctaaatagaaattagataagaaagctgtagctaattcaatggtttttcttaattgattaaaatcattataaatgaaaataacagacgcaatgaaagacactaatgccattgctgtaataaaagcaggataaattcgtttaatacgtcgagtataaaattgtttaaacgaaaaagaattctgttgaatttctgtgataataataccagtaatcagaaaaccagaaataacaaagaaaatatccaccccaagaaaaccaccagataaccagttttcattaagatgataaataatgactgaaataacagcaattgcacgtagtccatcaatttctggacgatatttaatagatgacataatattccttttataaaatataaaccgcaccttgatttatgcgtcaaaagtgcggttatttttttatatatttttatacattgaatcggaagtgcatgacatcgccatcttgtacgatgtaatctttaccttctaaacgccatttacctgcttcttttgcaccgttttcgccgttgaattggataaagtcttcataagcaataacttctgctcggataaagcctttttcaaagtcggtgtggattacggctgctgcttttggtgcggttgcgccgactgaaactgtccaagctcgtacttcttttacgccagcagtgaaataagtttgaagatttaaaagcgcatatcctgcacgaattacacggttcaatcccggttcttcaatgcctaaatcttgtaaaaactcgactttttcttcatcatcaagttctgcaatttcagattcaatcgccgcacatactggaacaactaccgccccttcttttgcagcaatttcacgaacgcgatctaaatatgggttattttcaaagccatcttcatttacgtttgcgatatacattgttggttttaacgttaagaagttgtaactcttgattgcttgcaattcttctttatctaacccaacagaacgaatcattcctgcattttccagcacaggaaggattttttccataacggaaagttcaaatttagcttccttatcgccacctttggcacgtttttgtaaacgttggattgctcgttcacagctgtctaagtctgctaaggctaattcagtgttgatagtttcaatatcatcaagcggatcaattttccctgcaacgtgtacaatgtcatcgttttcaaaacaacgcactacgtgaccaattgcatcggtttcacgaatattagcgaggaatttattacccaagccctcgcctttgctagcacctgcaactaagcctgcgatgtccacgaattccatcgtggtaggtaatatgcgttcaggcttaacgatttctgccaatgcgtctaaacgtggatctggcattggcacgacacccgtatttggttcgatagtacagaatggatagtttgcggcttcaatgccagctttagtgagtgcgttaaaaagagtagatttgccgacatttggcaatcccacaataccacatttgaatcccataatttttccttattttgagtaaaacggttgtaaaactaaccgcacttttaaattttaaaactgtttaaacgattggtcgctttgaccattccatctttgaaaatcatttctacacaatcagttgcctcatctaacactttttcaagtgcattgcgatctgctggagatggtttatttaaaacataacctgccactaaatcacgatgacctggatgcccaatgccaatgcgtaaacggtagaaattattgttattgcctagttgtgccacaatatcttttaagccgttatgtccgccatgtccaccgccttgtttgagtttcgctgtgccagcaggcaaatctagttcatcgtgaataaccaaaatttcttcaggtttaatacggtaaaaacttgccaacgcaccaactgctttaccgcttaaattcataaaagttgctggcactaaaaggcgtacttcttttccattcactaaagtgcgggcagtttttccgaagaatttactttctggatttagcgaaacgttaaaacgacgtgccaagcgttcaataagccattcgcctgcattatggcgtgtatcggtatatttatcgccaggattgcctaaaccaacaatgagttttatttctgacatttttatttgatgatgtaaaaatttgatgatgtaaaaaatagtggcgtattgtagcgaaaaagccttaaattctcaatctataaggcggaaacaaagaggtaatttattgctcgtgatttatcattaaaagtcaccgcacttttccgttataatggctaaaattttttaacaaagaaataaaaatgaatcagattaacattgaaatcgcttatgcttttcccgaacgttattatttgaaatcttttcaagttgatgaaggtatttccgtgcaaacggcgattatgcaatcagggattttaagccaatttccagagattgatttgagcacaaataaaattgggattttcagtcgtccaataaaattgactgatgtattaaaagagggcgatcgtattgaaatttatcgtccattacttgctgatccgaaagaaattcgccgtaagcgtgcagcagagcaagctgcagccaaagacaaagaaaaaggagcttaaaaatgaccgcactttcatccgttgatttttgtttacctgaacatatcacgccagaaatttttctacgtgattattggcagaaaaagccacttgtgattcgtaacggtttgcctgaaattgttgggcagtttgagccacaagatattattgaacttgcacaaaatgaagatgttaccgctcgtttagtgaagacattttctgatgataattggaaagttttttttagccctttgagcgacaaggattttcaaaagttaccagaaaaatggtctgtgttagttcaaaatttggagcaatggtcgcctgaattagggcaactttggaacaaatttggctttattcctcaatggcaacgtgacgacattatggtgtcttacgcgccgaaaggtggctctgttggtaagcattatgatgaatatgatgtatttttagtgcaaggatatggccatcgtcgttggcaagtgggtaaatggtgcgatgcaagcactgaatttaaaccaaatcaatcgatccgaatttttgatgatatgggcgaattagtcattgatgaagtaatgaatccaggcgatattttgtatattccagcccgtatggcacattatggcgtggctgaagatgattgtttaaccttttcttttggtttgcgttatccaaatttaagtaatttgattgatagcgtaagcaaaagtttctgtcatcaagatccagatttgaatttaagcgaatttgatttaccgctacgtttaagccagtctgaacaacgtacaggtaaacttgcagatgaaaatattcaagcaatgaaacagcttttattagataaattggctaattcaaaagcttttgatacgttatttaaacaagccgtagcaagtgcggtaagttctcgtcgttatgagttattggtttctgatgaaatgtgcgatcccgatgaagtgcggtcaattttagaagaagatggcgcattcctttctcaagacaacaattgtaaattgctttacaccgaaaatccgttgcgaatttatgcgaacggcgaatggttagatgaacttaatataattgagagcgaagtattaaaacgcttgtctgatggcgaaagtttagattgggtatttctatctaatttagtgaatgaaaccgaagatcccgaaacttcaatggatttactgttggattccatttgtaactgggttgatgatgggtgggcgttaattgaataatatgtcagacaatatttattccgtctctcaactgaattctgccgcacgtcagatgcttgagggtaatttttgccaaatttggctaacgggggaaatttccaattttacccaacctgtgtctgggcattggtatttaacgctgaaagatgaaaatgcacaggtgcgttgtgcaatgtttcgtatgaaaaatttgcgtgttgcttttcgtccacaaaatggaatgcaagtgcttgtgcgtgccaatgtgagtttatatgagcctcgcggcgattatcaacttattattgattcgatgcacccagcaggcgagggattattgcaacagcaatttgaagcgttaaaaatgaaattggctgcggaaggattgtttgctcaaaatcttaagaaaaatctaccgcactttagtaaagcagtggggattattacgtcttctacaggtgcggcattgcaagatattttgcatattttggcacgccgtgatccaagtttaaaagtcgttatttatcccactgcagttcaaggcaaagaggcgactgcagaaattgtgcaaatgattgaacttgctaatgtgcgacaagaagtagatgtattaattgtgggtcgtggtggtggttcattagaagatctttggtgttttaatgaagaagaagtggcgcgagcgatttttcgttcaaccttacccattatcagtgcggtgggacacgaaacagatgtgacgattgccgattttgtggcagatcttcgtgcgccgaccccttctgcagcggcagagttagttagtcgtaatcaagatgaattattgcaacaacttcgccatcaacagcaacgtttagatatggcatttgatcgtttatttacacgaaaaagccagcgtttgaaacagcttgccttacgattgcaaaatcaacatccacagaatcagctacgcgctcaacaagcgaaaaatgaacagcttacacatcgcttgcaacttgcaatattgcgtcagtttgaaaatacacaacaaaaattcaccgcactttcttctcgtttaaaacaaaatccattgccatatcgcatacaacgtcatcaacagcatttagaacaacttcaagtgcggttaaatttttgcgtaaatcgccaagtgacggaacgtcaaaataaactggcaacattatgcggaaaactggatggcttaagcccattgaaagtcttggcgagaggttattccattgtggaaaatccgcaaggtaaagccattgttagcgtgaaagatgtcaatcaaggggacttcattacaactcaagtggctgatggaaaaattgtgagtaaggttttgtaagatgcttattttgtaaaaatggcattttgtttttttgtgactcacttcaaactctcaacaaaaagtggaaaccttctattttttttgtagtcttttaagcgtatgattttgcgtgcagttttggagaaaacagatgtcagaaattcaacattttagccaacaagatatagaaatattgggcgaacaaactttgtatgaaggttttttcacgcttaaacgaatccaatttaaacataaactttttgctgggggacaaagtggcgtcgtaacccgagaattactgattaaaggtgccgcctcagcggttatcgcttatgatccaaaagaagattcggtgattttagttgaacaagttcgtattggcgcggcttatcatccagaatctagccgttcgccttggttactcgaattaattgcaggtatggtggaaaaaggcgaaaagccagaagaagttgctttgcgtgagagtgaagaagaagcagggattcaagtcaaaaatttaacacattgtttaagtgtgtgggatagccccggtggcatagtggagcggattcatttatttgcaggcgaagtggatagcacacaagcaaaaggcattcacggtttggctgaagaaaatgaagacattcgagtgcacgtagtaaaacgtgaacaggcgtatcaatggatgtgcgaggggaaaattgataatggcattgcagtgattggattgcagtggcttcaattaaattatgctcagttacaacaaagttggaaacgtagttaggcggcattaatgaaaaatacgtttgtttatcaggcggaaaagcctgttataaagttattacaaattacggatccccatttatttaaagatgaaagtgcggaattattgggggtaaatacacaagcaagttttgctcaagtattaaaggaaattcagcaagaaaataacgaatttgatgtgattcttgctacaggcgatcttgtgcaggatagtagcgatgaaggttacattcgttttgtagaaatgatgaaacctttcaataaacctgtgttttggattccaggaaatcacgattttcagcctaaaatggcagaatttttaaatcagccaccaatgaacgtggcaaaacatcttctattaggcgaacattggcaagccttattgttggatagccaagtttacggtgtaccacatgggcaactaagccagcatcaacttgatttattaaaagaaaccttaggaaaaaatccagaacgctataccttggttgtattacaccatcatttattaccaactaattccgcgtggcttgatcaacataaccttcgtaattctcatgaattggcagaagtgcttgcacctttttccaatgtgaaagctattttatatgggcatattcatcaagaagtaaatagtgaatggaatggttatcaagtgatggcaacaccagcgacttgtattcaatttaaacctgattgccagtatttttctcttgataccttacagcctggttggcgtgaaattgagctacattcagatggttcaattcgtacccaagtgaaacgtattcagcaagcggaatttttaccgaatatgcaagaagatggatattaaattttgtggacgttttaaaaatcactttcatagtaagcatttttaaaacgtccactattctaacccaataaaagtgcggtcaaatttttaattgtttttaacgattcgccagttcaaaaatcatcgcttctgcttggcaactaaaagtgaaagaggcatttaattgaacgccgttttcaactgccacgatttcgcttttaatttcgcaaggatcgctttctatatcgcgcgctttcttcgttaatcgttcaagcgctgcattggcatcagcttcagtgctataaaattgatgtacttctacgctacagtcagagccatcaataatagtgcctacatcaacacagctgcaagttaaggattcttctgctttgcattttacggtcattttcttttccttatatgaatgtttttgtgcattttatcatttttctgtttgtccataaatgacaaaaattgaacaaaacaatccattaaatgcaaaaagctcctgctaactagtcgtagctctaataaaaataaggaatagagttgcactcaatagattcgggctttataattgcccagatttttatttataacaaagggttccaaatgaaaaaatttaatcaatctctattagcaactgcaatgttgttggctgcaggtggtgcaaatgcggcagcgtttcaattggcggaagtttctacttcaggtcttggtcgtgcctatgcgggtgaagcggcgattgcagataatgcttctgtcgtggcaactaacccagctttgatgagtttatttaaaacggcacagttttccacaggtggcgtttatattgattctagaattaatatgaatggtgatgtaacttcttatgctcagataataacaaatcagattggaatgaaagcaataaaggacggctcagcttcacagcgtaatgttgttcccggtgcttttgtgccaaatctttatttcgttgcgccagtgaatgataaattcgcgctgggtgctggaatgaatgtcaatttcggtctaaaaagtgaatatgacgatagttatgatgctggtgtatttggtggaaaaactgacttgagtgctatcaacttaaatttaagtggtgcttatcgagtaacagaaggtttgagcctaggtttaggggtaaatgcggtttatgctaaagcccaagttgaacggaatgctggtcttattgcggatagtgttaaggataaccaaataacaagcgcactctcaacacagcaagaaccattcagagatcttaagaagtatttgccctctaaggacaaatctgttgtgtcattacaagatagagccgcttggggctttggctggaatgcaggtgtaatgtatcaatttaatgaagctaacagaattggtttagcctatcattctaaagtggacattgattttgctgaccgcactgctactagtttagaagcaaatgtcatcaaagaaggtaaaaaaggtaatttaacctttacattgccagattacttagaactttctggtttccatcaattaactgacaaacttgcagtgcattatagttataaatatacccattggagtcgtttaacaaaattacatgccagcttcgaagatggtaaaaaagcttttgataaagaattacaatacagtaataactctcgtgttgcattaggggcaagttataatctttatgaaaaattgaccttacgtgcgggtattgcttacgatcaagcggcatctcgtcatcaccgtagtgctgcaattccagataccgatcgcacttggtatagtttaggtgcaacctataaattcacgccgaatttatctgttgatcttggctatgcttacttaaaaggcaaaaaagttcactttaaagaagtaaaaacaataggtgacaaacgtacattgacattgaatacaactgcaaattatacttctcaagcacacgcaaatctttacggtttgaatttaaattatagtttctaatccgttaaaaaatttagcataataaagcacacttccacactaagtgtgcttttcttttataaaacaaggcgaaaaatgaccgcactttattacacttattacccctcgccagtcggacggcttttgattttatctgacggcgaaagcattacacatattgattttgaaaaagagcaatatgcgcctaatccaaaatggcacaagcaagatgaattgcctgtttttcaaaaagtgcggttggcttttgaacgatattttaatggcgaagttgagtgtttttcaaacattcccttaaaaccagaaggcaccacgtttcaacaagcaatttggcaagccttgcgaaaaattgattatggcgagctttcaagttatggagagctggcgttacggattaataatcctaaagctgttcgtgccgtgggcggtgcggtagggagtaatccgattagtattattattccttgtcaccgcattttaggcaaagatcggactttaactggttttggtggtggcttagaggcaaaacgttttttattgcagttagaaaaaattccctatattgataaaggcactgaaaatactaagcctcgcttttttaagaaatatcacgaatgattccacaaacccttgaacaattactttcccaagcgcaatcaattgcaggcttaacttttggggagttagctgatgaactgcatattcctgtcccgattgatttaaaacgtgataaaggctgggtggggatgttattagagcgtgctttaggcgcaacggcaggaagtaaagctgaacaggatttttctcatttaggcgttgagcttaaaacgttaccgattaatgcggagggttatcctcttgaaaccacctttgtgagccttgccccattggtacaaaattcaggagttaaatgggaaaattctcacgttcgtcataaactttcttgtgtactttggatgccgattgaaggcagccgccatattccattacgtgaacgccatatcggcgcgccaattttctggaagccaaccactgggcaagaacgtcaattaaaacaagattgggaagaattgatggatttaattgtacttggcaaattggagcaaattaccgctcgaatcggggaagttatgcaacttcgcccgaagggtgtaaatagtcgcgcagtgacaaaaggcataggaaaaaatggcgaaattatagataccttgcctttaggtttttatctaagaaaagaattcaccgctcaaattctgaacgcatttttagaaacaaagtcgctttaacttgattttaagactctttaaaaacacggaaaaaacctaccgcactttttagctcattaccataaaaaattaaaggaatccgatttcgttcccaaggtggtacgcttaattcttgccagattttttttatatcttctcttgggcgtttcggatgatgtttcactttgcccgaatagccaaaacgaatagaaataggcaagttcgttttttccagcgtaacagagtaatcctgccagtagaaaatcagattatgttcattttcttgaacagtgagattgcctaaatcatcgggtaaatttagcgtattttgttctaattttagggtgcatttggttagatcagaaaacggcttagttaaatataaactatcttgataacgtcgaataactttatttacaagctgaaattgaggatttgcctcttcttttgcaaaaacaacatcattaataagctgtgtaagctggcgtttacttggcatttcaagttggttttcagcaagccacatacgcaaaagtgcggtttgttttgcgagagaatatttgcggaactggcacagtttaaattggttttttatttgacaatgttgtgcaaaggtttcactcaataaatcattaattagctgttgttgctcaaaacaatgttgtgctgaacgttgcacggctaaatcaaaataagcccagcgttcacgtaattctggcaaaatttcattgcgtaagaaattacgatcgtatcgattatcttcattactttcgtctgtaatccagttgagattttctttttgcgcgtaattttctaactgggtgcgagtaaagcctaacaaagggcgtaaaattggcatgccgaacaatacactttgttgttgcattgcacctaagccttgtagcccactgccacgttttagggctaagaaaaaggtttcagtttgatcgtttagatgatgcgctgtgaccagcatttcttgtgtttgaagatatttttttatggcttgatagcgtgcttcacgtgcgccagcctcaataccattagttttatctacttgtactcgctcgataatcaacggaatttgaaattgatcgcataagtcttggcaatgtttagcccaactgtctgcattggggcttaatccgtgatgaatatggattgctcgtactgataaaggcggtaagtgcggttgtttttgacgaagttttgcaaataaagaaagaagtacagtggaatccaaaccaccactcaaggcgataagaaatgcttgagcggtggcttttttgagttgtttttcaatttctgaaagtaagtccattaggcaactttttcagctttataattgctgcttggattgagaatttcaaaacgtgcggcaatggtttgtaattcgtaagaacctagttcaaaggtggttttcattacgcctgctacttcattattcatcgcttcaaaggcttctacatcagattttccattgagtaaatttgctaagaatgtccctgcgattaaatcgcccacgcccactggttcaaagttgaattgataaagtggacggcttaaatgccaaacaccctctggggttgccataataatttcaaatgtatcaggatcgttaattttacccgcactacctaaatgtttaacgagaactttcttcacgccttttgcaattaacgcattcactgcttttaatacatcgtcaaaggtattaattgggaattcagtgagctgacgcaattcgtgcaagtttggcgtcataatgtctgccactggaatcgctttttcaataagtgcttcgcaaacaccattggcaaccacgcagctttttttcggatgtggcattacagggtcgcataaataaagcgcatttggattacgcagtttgatttgctctaaagcaaaaagaatttgatcgacttgttccgcagaacctaagtaaccagataacaaggcatcacattcttgtagtttttcaatgttatcaagtccagctacaatttctcggatttgttcttgtgggattaccatgcccgtccattttccgtattgggtgtgattagaaaattgcacggtatttaatgcccatacatcgacgcctaataactgcattggaaaagttgcggatttgttacctgcaaaaccatagaccacgtgggattggatcgaaagtacgtttttcattgtgttttctcctttgttgtatatttagatcaaaaaagagcggcaaaaatcaccgctcttttagaatgtcagttagcaataaccgtaagacattaaacgttcatagcgtctatttaataattcttctttgcttagtccgtcaagttctgctaaatcttcttttaaacgaagttttaagttttcagctatttctagataattacgatgtgcaccacctaaaggttcttgcacaatgccatcgataagatttaattcttttaaacggcttgcggttaatcccattacttccgctgcagtcgatgctttttccgcacttttccaaagaatagaagcgcaaccttcaggcgagataacagaataagtggaatactgcaacatattcactttatcgcccacgccaatagctaatgcaccacccgaaccgccttcaccgataacggtacaaataacgggaacggtaagttgtgccatttctcgtaagttgcgagcaatagcttccgcttgaccacgttcttctgcgccaatacctggataagcccctggtgtgtcaataaatgtaataattggcaatttaaaacgttcagccatttccattaaacgtaacgctttgcgatagccttcaggtgcaggcataccaaaattacgactcactttatcttttacagtacggcctttttgatgaccaattaccatcactgggcgaccatctaaacgtgccaagccaccaacaatcgctttatcatcagcaaaagcacgatcgccagcaagttcttcaaattccgtaaaaatatgttcgatataatctaatgtataagggcggtttggatgacgcgccatacgtgaaacttgccaagcatcaaggttagcaaaggtttttttagtgagttcgttacttttcttttgtaagcgtttgatttcatcagttaaatcaactttatcatccgatgctgagcataatgcttcaatttttgcttctaattcggcaatcggcaattcaaaatctaaatattcttggttcattttgttatcctaaaaagaccgtaaaaatcgaccgcactttatcaagaattaaactgtggcgcaaatggttttcactggttgggcaagctcataatcgctcttttttgaagagtgataagacaaataaaaacgctgaacaaatcacaacggaaggcccagcagcggtatcataaaaggctgataagattagcccacctataattgacaacatactgactacaattgcccagcccaccatagattctggcgttctcgcaaagcgacgagcggttgccgcagggatgattaataaggatgtgattattaatgcaccgacaaatttcatactcaaggcaatagtcaatgcggttaatatcattaaaataaaacgcatttttttgatattaatgccttcaacttgcgcgagttctggcgatacggtggtggaaagtaaggattgccaaaagtaaattaatgttgaaagcacaattatcacgccaatgccaatataaattaaatcggtataattaattgcgagcaaatccccaaataaataattcattaaatctacccgtacattccgtaataatcctactgtcacaacgccgagagataaacaactatgagcgataataccgagcaaggtatcaatagaaaattgcgtgttgctttctaaccacaccattgcgatagcaagaattaaggtcagcaccacaatcgcaatgtaaggattgacttgtaagaaaatccctaacgctacgccgagcaaggcagagtgagaaagtgtgtcgccaaaataagccattttctgccacactacaaatacgccaagtggcgcagtaataagtgaaagcaaaatgcctgttaaaaaggctggaaataaaatttcaaacattatttatccttattttggcaatgcactgctgatgaattacaaccgcacacatctccgtgtaaagtgtgatgatgattgtgatgatgggtataaaagccgatattttgtgcgatctgatttccccataaacgcataaatgttggatcatttgagagaacatcaggcgtacctgcacaacaaatatgttggttaatacacaatacttctttactgtctgccatcacaatgtgtaaatcgtgtgataccatcaatacagcacaatttagtttttgttgggtttgatgaatgagctgataaagctctgcttgcccagtaatatctacgccttgagtgggttcgtctagcacaagtaaatttggtttatttaaaattgcacgcgccaataatacccgttgcatttcgccaccagatagtttttgcatattatttttgcgtaaatgtgaaatagaaagttgctcaagtgcggtggatatttcttgtgttttaatgcctttttttagcgaaagaaatcgctcaaccgtaataggcaaactatgatctaaatggattttttgtggcacatagccaatgcgaacatttttactgtaaatgacctcgccagaagtgggcgtttgtagttttaataaggtttttaataacgtagatttgccaccaccatttggaccaacaatagtgataatagaattcggatagatatttaaattaatatcttgcagagcggttttttgtgcgaaaaccacattgatattttttaattgaatgagcggttgttggttttgctcgttgcgaatggctgtgatattcataaaatcgccgtgttttcaacaatggttggggaaaataacgcatttttatagaattctcaagattttctctcttatgtcgaatatttaagcgtttgaataatgctttttccataggaatgaattttctttataatctgtagtctgaatgctgaaaacttttttattttagggatgccagtgcaacacgtaaaattagctcgagatagacgaaaaaaacgcgcatatataaaagtaggcgtgttttttgttgctattttgcttattttgacaggcattttacttacaataaaacaacctgaagaaaactccatattttccacctttgacagtggggaatatcacgagttaaatacatcgccaaatgaaaattccaccgcacttcaacctgatgaaaacgctacctcttatgatgatgagctacaagcaaaagatgacgaagttgatgaagtaaaactatcttcagatgatctcgatactttacctcaacacgcacaagacgcactcaatggtttattagacgcagccgatcaagccataagaattactaatcaatttagctatacggtaaccgaaggggataggttaaaagatgtcttagttttgtcaggtttagatgattcatcagtacaaccattgattacgcttgatcccgaattagcccacttaaaagcaggtcagcaattctactggattttagataaaaatgataacttggaatatttaaattggctggtttctgaaaaagaagaacgtatttatgaacgtctcgaagatgggaaatttaaacgccaagttattgaaaagaaaagtatttggcgaaaagaagtattaaaaggcgagattcaaaattctttaaatagtagtttaagagaaaaaggtcttgatacgcgtcaaattagccaacttagtaacgccttacaatggcaagtgagtttgagaaaactaaaaaaaggaactcaatttgccattttagtttctcgtgaatatttaggcgataaactcactggtcaaggtaatgttgaggcgttacgtatttcatctggtggtaaaaattattatgctgtgcaagctgcaaatggtcgttattataatcagcaaggagaaaccttaggcaaaggttttgctcgttatccattgcaacgccaagcacgcgtttcctccccttttaatccaaatcgtcgtcatccagtaacaggacgtattcgtccgcataaaggtgtggatttctccgtttctcaaggcacaccagttattgcaccagcagatggcacagttgaaaaagtcgcttatcaggctggcggtgcaggacgttatgttatgttgcgtcacgggcgtgaatatcaaactgtttatatgcatttgagcaaatccctagtaaaagcagggcaaacagttaaaaaaggcgaacgtattgcactttctggtaacacggggatttctacggggccgcatttacattatgaatttcatattaacggtcgagcagtgaatcctcttactgttaaattacccggtactagcagtggtatgagttcagctgaacggaaacaattccttgttcgtgttcgtgaagctgaaagaatgttaaaaccttagcgatataaagtgcggtcaaaaatggtcgcatttttaccttatgtaaaataatatttacactttgttgtaaagaaattatcatagccatatcttaattatctccattccctgaatatgacgatttctaaatttaatcctcaaaaacctttcgagtgttttattgtacaaagtgaagcgatgaaaagtgcggtagaaaacgcgaaacgttttgctatgtttgatgcgcctttgttaattcaaggcgaaacggggagtggaaaagatttgttagcgaaagcctgccattatcagagtttgcgtcgcgataaaaaatttatcgcagtaaactgtgctggtttgcctgatgaagatgcggaaagtgaaatgtttggtcgaaaagtcggagacagtgaaaccattggtttttttgagtacgctaataaagggacagttttactcgatggcattgccgaactttcattaagtttacaggctaaattattgcgttttttaacggatggatctttccgtcgagtaggcgaagaaaaagagcattatgcaaatgtgcgcgtgatttgcacatcacaggttccacttcatttgcttgttgagcaaggtaaagttcgtgctgatttatttcatcgcttaaatgttctcactattaatgtgcctgcattacgagatcgcatggctgatattgagccactggcacaaggttttttacaggaaatcagtgaagaattaaaaattgcaaaaccaactttcgataaagattttcttctttatttgcagaaatatgattggaaagggaatgttcgtgagctttataacaccctttatcgtgcttgttcgttagtacaagataatcatttaactatcgaaagtttaaatcttgctctgccacaaagtgcggtgatttctttggatgaatttgaaaataaaaccttagatgaaattattggtttctatgaagcacaagtcctaaaattattttatgctgaatatccaagcacgagaaaattggctcaacgtttaggcgtttcccatactgccattgcgaataaattgaaacaatatggaattggaaagtagttttcacatttgagatgaaaaaaagtgcggttgaaatttcctgagaattttcaaccgcacttaataaatattaattatccattaatggtattgtgattactctgcttgagtttccacgttttcaactgcttctgttggagcagtatgatgattgttattgtgatgggaaactgaacgagcaggcacaaccgttgaaattgcgtgtttatataccatttgattcacggtgttttttaataaaatcacgaattgatcgaatgattcaatttgaccttgaagtttgattccgtttacaaggtagattgatacaggaatgcgttcacgacgaagcgcatttaaataaggatcttgtaaagattgtccttttgccattttgctatcctttgttgtcgttattatgaaatttgttgatagaaacgagttgtctccgtgtgtaagtgtagcaataaacagaaatattgtctatttgctttcccgcaacttttgcaaaattgctttcatttgatgatctagtgacgcattgaaacgtagtgtttcgccatttttagggtgttcaaaccgaattgaaaaagcgtgcaaaaacaaacgatttaatcctaattcattcatttgtttatcaaaatctttatcgccgtatttatcatctaatgcaataggatgcccagcatattgtgtatgcacacggatttgatgggttcgccctgtgactggtgaagccttcacaagcgtagcatttatatagcgttcttcaatgctgaagcgggtttcagatggttttccttgctcgctgacacgcacaatgcgctctccgctagataattcatttttcaaaagaggggcttgaataacttttatatgggattgccattgcccacgtactaacgctaaataatctttttgaacggttttgacgcgaagttgttcgtgtaaattgcgtaatgctgaacgttttttggcaattaataaaatgcctgatgtatcgcgatctaaacgatgaaccagttctaaaaagcgtgcttctgggcgtaatgctcgtaaggcttcaatcacaccaaaatttaaaccacttccgccgtgcaccgcgattcctgagggtttatttaaaataatcaagcaatcatcttcaaacaaaatttggttttcaagtgcggcaactttattgagattttttgaaatcggcgcatcatttttttctgcgacacgcacaggtggaatgcgtacaacatcgcctgtttgcagtttatattctggtttaattctgcctttgtttactcgcacttcgcctttacgcacaatgcgataaattaaacttttgggtacacctttgagttttgctaataaataattatcaattcgttgcccagtttcatcttcactaattgtcagcatttttacggatgaattaatgattttttcattttgttttgtcattttttttccttttgaaaatcgctgcaaatcatatcataaaggcactataaacgtaatatgaacgtcactctatgaacgcaaattcgccttgctaattaatcattttctatggataatagaccctctttttgcgcctaagaatttgcgtaaaaaaggataagttttgttggtgaaaactcaatgcggcaattggcataagacattgataatcaacatttttcttaaaataaatcagccgtttgcaacgcgtgcggaatatcgcgttgttttatcaagcaaatatttatgcttaataacgttatcaatgcacccagcaacatacagtcgtgagattgactggcgcgagaaacacgaggtcgataacgaagcaaagtgcggtttattttgaggtttttttaaatatttaataagagaattgacaatgaaaagaatgttaatcaatgcgactcaaaaagaagagttgcgtgttgcgcttgtcgatggacaacgcctttttgacttggacattgaaagtccaggacacgaacaaaaaaaagcgaatatctacaaaggaaaaattactcgcgttgagccaagcttagaagcggcttttgtagattatggtgcagaacgtcacggttttttacctttaaaagaaattgcccgtgaatattttcctgatgattatgtttttcaaggtcgtccgaatattcgcgatattttgactgaaggacaggaagttatcgttcaagttaataaagaagaaagaggaaacaaaggtgcagccttaactacttttgtttctcttgctggcagttatttggtgcttatgccgaataatccacgggcaggaggaatttctcgccgtattgagggcgatgaacgtactgaactaaaagaagcattaagttcattagatgtgcctgacggtgtaggcttaatcgtccgtactgctggtgtgggaaaatcgccagaagaattacaatgggatttaaaagtattattacatcattgggaagcgatcaaacaagcttcacaaagtcgtccagctccatttttaattcatcaagaaagcgatgtgattgtacgcgctattcgtgattatttgcgtcgtgatattggtgagatcctgattgatagcccaaaaatttttgagaaagcgaaagagcatatcaaacttgtgcgtcctgatttcatcaatcgcgtgaaactttatcaaggcgaagtgccacttttcagtcactatcaaattgaatctcaaattgaatccgcattccaacgtgaagtgcgtttaccttctggcggttcaatcgttattgatgttaccgaagcattaaccgccattgatattaactccgcacgttctactcgtggtggcgatattgaagaaaccgcattaaataccaatcttgaagcggcagatgaaatcgcacgtcaattacgcttacgtgacttaggtggattagttgtcattgatttcattgatatgacaccaattcgccatcaacgtgaagtagaaaatcgtattcgtgatgcggttcgtccagatcgcgcccgtattcaaattagccgaatttctcgttttggtttgttagaaatgtcacgtcagcgtttaagcccatcattgggcgaatcttcgcaccatatttgccctcgttgtcaaggaacaggcaaagtgcgtgataatgaatctctttctttatctattttacgtttgctggaagaagaagcattaaaagaaaacaccaagcaagtgcataccattgtgccagtacaaattgcctcttatcttcttaacgaaaaacgcaaagcaatcagtaatattgaaaagcgtcataatgtcgatattattgttgccccaaatgaagcaatggaaacaccgcactttagtgttttccgtttacgtgatggcgaagaagtaaatgaattaagctataacttagcgaaaattcactgtgagaaagatgaaagcaccgaggaatctcttgtttctcgtaatgtggatacaaccgttgttgctgaacaacctgcagttgaaagtgcagtagttgcgctttctatttcagaggcagccccaacgccagttgagcgtaaatcaaatgaaccctctttgttagccaaaattattgcgaagattaaaggtttatttgcgactaaatctgaagaaaacaaaccgaaaaataaccgcacttcgcgtaatcctaatcgtaatcaacgccgttcacaggatcgtcgttcttctcgtcgtccacgttctgaaaataacgaaacagaaagaaccgaagaacaggttcgcaatgtccgtgagcgtaatcaacgccgtccgcgccgtaacttagtggaagaaagtatcgctgaaagtgcggtaaattctacacctgtttttgaggctaaagaagaaagaactgagcctgtaactcaacgccgccaacgccgtgatttacgtaaacgcgtgcgcgttgaagataatgaaacagttgttgaaaataacttcagcacgactgaaaaaatgccagaagtggatgtaattacggttcaaaataatgatgaaaaacccgttcatcagaaccaacgttctgaacgtcaagagcgtcagcgtcgtactccacgtcatttacgtgcagcgaataatcagcgtcgtcgccgtaatcaagagccaaaatcgccaatgccattatttgctgcggtggtttcgcctgaattggcaagtggcaaggcttggattgattattcaacggtaaatctgccaaaagaaaatcatttcttatctgtggatgaattgcttgagcaagagaaaactaaaaaagggtttatcacgccagcaatgggaattgtcgttgaagaaaaatcccctgatgtaaaacctgcattagattttattactcaaccagctaatgaatcggtgcagaaaaaagtacaagaatctttagaccgtttaagttcatataaacctcaagaagttgttgaatctattgatcctgcaattaatgtagatgaacctgaaacgctcgagaaagtatcacaatttgtccgcacttatgaatttaatggacgtttaggtacaatttcttcagtgccccatacaaaagcggagatgactttagcgaaagcaaatgatgaaatgccagaggatttcccaattagggcttggcaggattctcgttattatttctatggaaaaggcgcggcaggacatcattgtgcaattagccacgtttattctgaaccaacccgcacaaaatcagaataatcaaaaataaaaatagaattgacgtaaccaacattacgtcaattctttttatttttaacaaaaatcctttggaagaaccctaatgaatattcgaattgagaaatcttctcttctgctgtacaagcaaaggaagataatggaaaagggatttatgtgcaagccgattgggtgcacgtgcgtgaaaaagtagagacatataatccaaatcaacctgaactattacaagagtatttaaacatcaaaactcattccaaccatcctcgtttttctattggttatgatttcggcaattggcgtttagcattagattactcccattatgatcgctgtttagaaaacgtgcgttttaaaactcacgaagcctctttcggtgtacgttaccgtttttaattaaacaaatttagttttctgtttaagcggtcaaattcttctcattatttgcaaaatgagggaaaaatttgaccgcttgttttttcttgaaaagaagcgtaaacttcatgcaatttttagtcggggtgcctaaaggctgagatgatacccgtgaacctgaaacagttagcactgacgtaggaaactaatatgccacatattcaacctttctctatcacgattttatcctgtttattttcccaattttctacattttattacacccgctaattgctcacagtgaatagcgggcatttttgtttattttatattcaacacaaggaatgcttatgcaatcaatttatctctccaaaatccgtgagcagaatccgctcattcataacattaccaacattgtggcagcgaattttagtgccaatggcttgttggcattaggagcttcgcctttgatgtcggcgaatgtcgaagaaatgcaggaagtaccgaaaatcagtcaagcattggtcattaatattggtacgctgattggtaaagatcgggaggcgatgttgcaggcaggaaaaacagcaaatgaggttggaattcctgtagtgttagatcctgttggtgtgggggcaacgagctatcgccgtgagaccattcgtgagcttttagccgaggtaaaattcgcacttattcgtggtaatgcgggcgaactcgctgcaattgcaggcgaggcgtggcaggcaaaaggtgtagatgcagggcaaggcgaagtagatttaaaagccgttgccgagaaagtggctcaacgctatggctgtacggtattgattagtggggcggtggatattgtcagcgatggcacacaaactgcgaccgttcacaacggcacgtcattgttcccgaaagttacggcttcgggctgtttattgagtgccgtgtgtgctgcatttttagcggtaagtgaagggaattatttttctgcgacattagaagcctgtgtagcatacaccattgcaggcgagtgtgcggcgcaaggcttaaccacacaagtgggacagttccaaatccgtttgttggacgagcttgctgcactttcccctgaaaccattggacaaagagggcgcattaatgagtaatgtgaaacaagttttaaccatcgcagggtcagacagtggcggtggtgcaggcattcaagcagatcttaaaaccttccaaatgcgcggcgtgtttggtacatcagcaatcacggcagttacggcacaaaacacacttggcgtatttgatattcaccctattccactgaaaacaattcaagcgcaactggaagcggtcaaaaatgatttccagattgcaagttgcaaaattggtatgttgggcaatgcagaaattattgaatgcgtcgcagattttcttgctgataagcctttcggcacgctggtgctagatcctgtgatgatcgccaaaggtggcgcacccttattgcaacagcaagcggtgagtgcgttaagccaaaaattgctgccgttggcggacgtgattacaccgaacattcccgaagcggaagcattaacggggattgcgattgtggacgacatcagtattcaacaagccgcaaaagcgttgcaaaaacaaggagcgaagaatgtgattattaagggcggacattcgctcaattcgcaaagtgagctgtgccaagattgggttttacttgcagatggtcgtcattttactttgcaaagcccccgtttcaacacgccgcatacacatggtacgggctgtaccttttcagcctgtttaaccgcagagttggcgaaaggcgaaccgttacaaagtgcggtaaaaacagcgaaagattttattaccgctgcgatttctcacccattgaatattgggcaaggacacgggccgacaaatcattgggcttacagtcgcctttaaggattgaaagatgaaaaatattcaaaaaatcttaccgctttactttgtggcaggcacgcaagattgccgtcatttgggcgagaacttgtcggaaaatttattattcgtgcttaaacaagcgttagaaggcggaattacctgctttcaatttcgggataaaggcaaattttcgttagaacatacgccctcagcacagaaggcactggcgatgagttgtcgtgatttgtgccgtgaatatggcgtaccctttattgtagacgacaacgttgatttggcgttggaaatcgaggcggatggcattcacgttgggcaaagcgatatgtcagtacaagagattcgagctaaaacagataaaccgctaattattggttggtcggtgaatcgtttagacgaggcaaaaatgggggaaaatttagcggaaattgattattttggaattggcccaattttcccaacgcaatcgaaagagaatccgaaaccaacactaggaatggcgtttattcaaactttgcgaaatgcgggcataactaaaccgcttgtggcaattggtggggtgaaattagctcacgttaaaaccttacgagaatttggggcggatggtgtggcagtgattactgcaattacgcacgccgataatgtgcaaaccgcaacaaaagcattacgggaggcaagtgatgaatacgcaaaatagtctaaaacaagtcgcgacagcgacgatggtcggcactgcaattgagtatttcgataactacatttacgcaatggccgcggtattggtatttaaccatcaattcttccatgccgcagatccactttcagggcagattgcggcactttccactttagcacttacttttattgctcgccctttgggagcaatattgttcgggcatttcggtgaccgtttcgggcggaaaaatacttttgtgatgagcttgctgttgatgggcgtttccactgtggttatcggtttgttgccaacctatgacagcatcggtatttgggcgacaattttgctctgtttatgccgtattgggcaaggtatcggtttaggcggagagtggggcggtgcagcgttagttgcggttgaaaatgctccagaaggtaaacgaggttggtatggtactttcccacaactgggagccccgcttggcttgttgttggcaaatggcgtattcttaggcattacggcaattttcgggcaagaagctatgactgaatgggcgtggcggataccgtttttatcttccgttatcttagtggcaattggcttatatgttcgcctaaaactgactgaagccccgattttccttgcggcactcaataaaccgcagccaaaacgcttaccaatgttggaagttgtcactactcattttaagccgtttttcttggggatgttaatttgtattgcaggctatgtgctgttctacattatgattgcctttagccaaatttacgccaaatctgccccaacggtttcagaggcaggatacgcaatgggattaggactttccccgcaaatttttaccgctttattgatggcaagtgcggtttcattggctattaccatcgccgtttcgggcaaatatatcgacaaagttggtcgccgtatttggctcatttggacaaccgttggcgttgcgatttttggtttatccttgccgttatttctcgaaaacggtacaactaccagtttgttttggtttttattcatcggtatggggttaattggaatgggctatggaccattagcgagttttttacctgaactcttccctactcacgcccgctattcaggtgcatcactcacttacaacatcgcaggcttattcggggcaagtgttgcggcaatcattgccttaccgctgaatgctcactacggcttaaaaggtgtggggatttatttaaccctaaacgctgtgttgagcttgattggattatggtttatttcagaaacgaaagataaattactatcctaagatttgaggaattaaatacaacctattaagcggttaaattttacataaaattctactaagaatttaaccgcactttcctttacaagccaaatattttctctacaataccccacctaacgatttaccttgagtaaatccctgacctgaaatcagacaaaagagaatattatgacaacccaattcaaaccagaattactttcccctgcaggctctcttaaaaatatgcgctatgcgtttgcttatggtgcagatgcggtttatgcaggccaacctcgttatagcttacgtgtacgcaataatgaatttaatcacgccaatttgaaaatcgggatcgatgaagcccattcccttggcaaaaaattctatgtagtggtaaacattgcgccccataattccaaactcaaaacttttattaaagatttacaacctgtcatcgatatgaaaccagatgctttaattatgtctgacccaggcttaattatgttggtgcgtgaaaatttccctaatattgatattcatctttctgtgcaagccaatgcggtaaactgggcaacggtaaaattctggaaacaaatgggattaactcgtgtgattttatcgcgcgaactttcaatagatgaaattgctgaaattcgccaacaagtgccagatattgaactcgaaattttcgtacatggtgcgttgtgcatggcgtattctggccgttgcttactttctggctatatcaacaaacgcgatccaaatcaaggcacttgcaccaatgcttgccgttgggaatacaaaatggaagaaggcacgacggatgaaataggcaacatcgtgccgaaaatcgatcctgctcaacaaatcgaagtgaaaaatgtagcaccaaccttaggcgagggtgcggtaacggataaagtcttcctttataccgaatcacaaaagcctgacgaacaaatgacagcgtttgaagatgagcacggtacctactttatgaattcaaaagatctgcgtgccgtacaacatgtggaaaaattgaccgcacttggtgtgcattctttaaaaatcgaaggccgcactaaatcattttattattgtgcaagaacggctcaagtttaccgcaaagcaattgatgatgcagccgcaggcaaaccatttgatgaaagcttaatggatacgttggaatcccttgcacatcgtggttataccgagggcttcttgcgccgtcatacgcatgatgaataccaaaactacgaatatggctattctatttctgatcgtcagcaatttgtcggtgaatttacgggcaaacgtaatgaacaaggtatggcagaagtagcagtaaaaaacaaattcttacttggcgacaatgtagaaatgatgacgccacaaggcaatattaatttcaaaattgaaaaaatgctaaatcgtaaaaatgaaacggttgatgccgcactaggcgatgggcattttgtattcttaaatgtaccacaagatattaacttaaattacgctttattaatgcgtaatttagttaataccaatacaagaaacccgcattgctagtgtgatataaaacagaatttaaatcatacctaattaaacattactgttacttggcttgcgtcgtttgccgatatttttcgtatccttatgacgcaattttacttttttctttgcctctgtttttttcttttcttcgcgtttttctttaatacgtgccttttgttttttgctgaccgatttcacttcgccatcttttggtggtttggtgcgaggttctaaacctgctaaaatgcgcgcctttaaaatttcctcagtataacgtttgattttacctagcaacttgtaatcatgcgcttcgacaaaagagaccgccgtgccttttttgcctgctcgtgcggtacgtccaattcgatgtaaataagtatccgcactatagggcaaatcaaaattcatcacgtggcttacatcatcaatatcaataccacgcgcagccacatctgttgcaaccaataccgtcacaatacctgatttcaatttatcaatggcattgttacgttgagtttgtgccatttcgccttctaaatatgcggaacgaatgcctcgtttacgcaatgtttcagaaagttcacgcgcatcttcacgacggcgaacaaacacaattccacgggttacttcttcagtttcaataaaacgcgcaagcaatttgattttgtgttcattgctgtctgcgtgataataccattggttgattttttttctttcacggcgacttggttccgcatctactttcacaggatcattcaacaaacgctccgcaaaatcgactaatagctccccttctaaggttgcagaaaacaacaaagtttgtttccgccaacgggtttcagctgcaattttttccgcatcttgcccaaatcccatttgcaacattctatcggcttcatcaaaaatcagcatttcaacggaacggcaatcaaaattttcttccttaatgtattgcaacaaacgaccgggcgttgccaccaccaaatcttgattggtattgaatacatcaccgtgattttgatacgccacaccacctgtaattgtcgcaatatttaaatgggtgaactgcgctaattcttccgcttgttcagccacttgcattgccagttctcgggttggtgttaataccaaaatacgcggtgggcctggtttacggcgtggataatccaataaatgttgtagcgcaggtaataaaaaagcagcggttttccctgttcccgttggagcagagcctaatacatcacgctcttccattgcggcaggaatggcttccatttgaatagctgttgggcgggaataaccttttttctcaagcgcctttaaaagttcgggagaaagatcgaattgttcaaattgggataaattcattattgtgcggttctttgttaaaattggcgaggattatacctgaaagtgcggtcaatttacgaaaaatttatgagcggatttacctttaaacagttccatatcaatcaaaattcttgtgcaatgaaagtcggcactgatggcattttgttaggtgcttgggctgatgtaaagcattgtaaaaatattttagatatgggctgtggcacaggattattggcgttaatgttggcacaacgaactgaagaaaactgtcaaattcaagcggttgagttggatcccattgcagcaaaacaagcacaagaaaacatcaatgattcagtgtggaaaaatcgcattcaacttattcaaacggatatacaacattttttacaaaccactgcacaaacctttgatttaattgtggcaaatccaccttattttgaacaaggtatcgcttgtaaaaatgaagaacgagaattggctcgttataccaagcaaagccacttaaattggttagaatgggctgccacgcgcttatcggaaaatgggaaaatcagttttgttttgccttatgaggcaggcaaaacgctcacaaaatccaccgcacttttttgcataaaacagaccaatgtcatgaccaaagtgggaaaaacgccccagagaatgttgcttacctttgccaaacaacccgaagttttaatgcaagatcaattggtaatttatgatgcggataatcaatacactgaagcgtttattgaattgactaaagacttttatttgaaattttaaaggggaaatcattttcccctttaatcatacactatctaaaataccacttcgctaacaacacacccgcattcactgcaatgtttaagcctgatttaattgggcttgcgagcgttaaacgcacttgtgtatcttctggcgttgctaaactttccgtagaactttcacttagcacaaaaaccactttattttttaaccgcactttatccaatgggtcgccttgtttattgtgcaatacgtgaataatttgatagcctgatttacgcaagtgcatcaacgccgaatcaatatcatccgtttctaacacacgaatatattctgcgccaccttctgctacacgcatagaggctcccgaatacagattttccacattatcggcgacaatatttttcacgccaaaataagcacaagtacgcaatacacctccgatattttgtgcattattcacgttgtctaatagcactaaacaatcctcgttacgaggaatatccaaatatccttgcaacgtgaaagcacgaggtttcttcactaataagcaaataccaccgtgatgttctgttccgctcactcgggctaattcttcactatctacaacgtgataagccttcttgttttcggctaaataactcaatacctcgccaattttgtgtgacatttgtacggttgcccacaatcgaacaatactttcagcgcgttctgcaaataaagctaaacaggcattttcaccataaaccttcatttcttccgcacggtttttcttaattttttcaggtgcacgaggagaaagcgcgcccgttttcttttcttttgttttataaaccgtacccgtactttttattgtcacttgaaccttaggtttttctaaatttttatttgatggcgcacgagataaagaaagttgcgtaattctagtttctttcacttcttgtttatcacgagaaaaacgagatttttcgtttctatttccatgaaatttatcattaaagtgcggtcgattttgagttggtttttctctgtacttttcccccactgagcgttcttgaaaggttttgcctgcggattgaaaagacggtttgcgtttgtcgttcatagggtttccctgagtaaaaatggctgttttttagccaaaaaatgctaaaatttgtgagcattataacgaaaaaaagccttttttctattaataagcacgtgaaatattgtaaactaacgcactagtctttaatcacgagatggattatgttaatcaataaaaccaaacgagctgaacaaaatttaaataatttgccattccttgccttgcaagccgagcaaattgaatttttgggtagctcggctgaatttaaaactcaaattattgaattaatcagaaacgcaaaaaaacgtatttatgtcaccgcactttattggcaaaaagacgaagcggggcaggaaattctcgatgaaatttatcgcgtgaagcaagaaaatccacacttggatgtaaaaattctcatagattggcatcgcgcacaacgcaatttattaggagcggaaaaatctgccactaatgcagactggtattgcgagcaacgccaaacttatcagttacctgatgatccaaatatgttctttggcgtgccaattaatacacgcgaagtttttggtgtattgcacgttaaaggctttgtatttgatgatacggtgctttatagcggtgcaagcattaataacgtctatcttcatcaatttgaaaaatatcgttacgaccgctatcaaaaaatcactcatgccgaattagctgattcaatggtaaatttcatcaatgattacttgttagatttcagtgcagtttatccacttgatgtcgccaaccgccctcgcaccaaagagatccgtggcaatattcgcgcttatcgtaaagaccttgctcaaaatggagaatattcattaaaaagtgcggtgaaattaccaaatgttttaagcgtatcgccattgtttggcttaggcgcatcaggcaatgaattaaatcaagtaattgaagatttattcttacaagtacaaaaaaaattagtgatttgtacgccatattttaatttcccacgcacattgcaacataaaatagcaacgttattggaaaacggtaaacgagtagaaattattgttggcgataaagtcgcaaacgatttttacattccaccagaacaaccattcaaaatggcgggggcgttaccttatctttatgaaagtaatcttcgccgtttctgtgaaaaatttgagactcaaattgaaagtggtcagcttgtggtgcgtttgtggcgtgatggcgataatacctaccacttaaaaggcgtgtgggtagatgaccgttatattttacttacgggcaataatcttaaccctcgagcgtggcgtttggatgcagaaaatggcttattaatttacgatccacaacaacagcttttagcccaagtggaaaaagagcaaaaccaaattcgccaacatacaaaagtattaaaacattactctgaattagaagaattgaatcaatacccagaaccagtgcaaaaacttttgaaaaaatttgcacgaattaaagcagataaattggtgaaaatgattttgtaattataagaaaaattttatgtttttcttaaattcgcttccagtattaatctgataaattttgtggcaatcgttctaaaatggctttccaataggttgaagaacgtaaattatgtttacggatgcaatccactactgcatctgcatttccctcaagacaaatttgttgcatttctaaataaaattgctttgttaattcacggtgttttttttctttaaaaaataacaaccctattcgctgataaacgccttttaaactattgaaaattaaacgataaaagggtttgttggcaacaacagtgaattgacgaaataattggtaatcaaattctgtgtaatcttgtgctgtgttttgtaattgctctaattcagcaaaaagtgcggttgatttttgaggggaattttttactgcttcataaatgtaagattccgacattttactacgtaaagagagcatattatcaataattaagggggcggactgcatatccaaagcaattagggtttcaataatattcggccctgcagcatcccaaatattatttactttggtgggtttgccgtgctgaattgttagccaaccatcacgagccaaacgttgtaaaacttcacgtagggtggtgcgagttacaccaatcttatcggctaaatcacgttctgatggcaaattactgcccgcaggaaaaacatcttgccaaatactctttacaatatattcctctgctaaagctgctggactttgggcttttaaaatgtcgttattgttttgcattacaattaaaaatcagataaaaatcaaaaaaaatgcaattttataaaaaaattacttggtttttattatcctttaaagggggatatattacaatgttcacgtgataaaaataatggagttcactatgacaaacattcaggcttttatgaaaaactttcttggggcaagtccagaatggtacaaacttgccattgtggtttttcttattataaatccaattgttttcttttttattagcccttttattgcgggttggttactggttgcagaatttattttcacattggcaatggcattaaaatgctaccctcttcaaccgggtggtctattagcaattgaagctattattattggaatgacaaatgccaaacacgtcaaagcagaaattatggcaaactttgaagtgatcttgctactgatatttatggtggcaggtattttctttatgaaacaattactgctttatgtatttactaaattacttgtcaaaattcgttctaaaattgcactttctattgccttttgttttagtgctgcttttttatcggcttttctcgatgctttaacggttgttgctgttatcattagtgtcgcaatgggattttatggtgtgtatcacaaagttgcatcaggcaataatttaattgatgcggttgatatttcagacgatggaaaaattattgaacaacagcacgaaatcttagaaaaattccgtgcattcttacgtagtttaatgatgcatgcaggtgtaggaactgcactcggtggtgtaatgaccgttgttggagaaccgcaaaacttaattattgcagaacaagcaaaatggaactttatggaatttttcttgcgtatggcacccgtgactattcctgtgtttatctgcggattactcacttgtttcttggtcgaaaaattcaaattatttggttatggcgagaaattaccagacgaagtgtggaaaatcttatcagatttagatcgcactaattcagaaaaaatgtctaaacaagataaaattaaattaggtatgcaagcgttaatcgcaatttggttaattcttggattagcattccatcttgccgcagtcggtttaattggtttaagtatcatcatttttgctacgtctttcactggtgtgacggatgaacatactatcggtaaagcctttcaggaatctttaccctttactgcattgctcgttgtattcttttctgttgttgcagtaattattgatcaaaaacttttttcaccaattattcacttcgttctttctgcggaagaaaatacacaacttgctttattctatttgtttaatggcttgctttcttctatttctgataatgtatttgttgcaacggtttatattaatgaagctaaagctgcactgactaatggagtaattgcaccgcatcaatttgaattgctttctgttgccattaatacaggtacaaacttaccatcagttgcaacaccaaatggacaagctgctttcttattcttattgacttcatcaatttcgccattaattcgcctttcttatggcagaatggtttatatggctttaccttacacgattgtactttcaatcattggtttactggctattgaatttattttaccagctgccacaatttggttagcaagtttaggtttaattttgccaatttaaggagagaaaatgctcgcactattaaaacaattttccgaaaaacgttttgtgtggtttttattggctttttcaagtttagccttagaatccaccgcactttacttccaatatggaatgggcttacaaccttgtgtgctctgtgtttatgaacgtttagcaatgattggcttatttgtagcgggcattatcgcattacttcaacctcgcactttcatacttcgattaatcgccttggctttaggtttattcagcagtattaagggcttattaatttcatttcgtcatcttgatttgcaaatgaatccagctccttggaaacaatgtgagtttattccaaattttcccgagactttaccatttcatcaatggtttccatttatatttaacccgactggctcttgtaatgaaagccaatggtcattatttggtttaacgatggtgcaatggctagtggttattttttcactatatgtggttattctcacattattgttaatcgcacaagtgattaaaacacggaaacaaagaagattatttaactaaaaaaatacggtgaaatttcaccgtattttttattacattaaaatcaaccgcactttattcaacggtaactgattttgctaagttacgaggttgatctacatcagtgcctttaattaaagccacataataagaaagtaattgcattggaatggtataaaaaatcggtgcaacaatatcattgacttttggcatcgtgatgattttcattccttcacttggcgtaaatcctgcttctttatcggcaaatacgtataattgaccgccacgagctcgcacttcctcaatgttcgattttactttttctaataattcattatttggtgcaacaacaatcactggcatatcagcatcaattaacgctaatggcccgtgtttcaattctcccgccgcataggcctcagcgtgaatataagaaatctctttcaatttcaaagaagcctctacggcaattggataaaacgcaccacgacctaagaaaagtgcatgatgtttttcagcaaaatcctctgctaaagcttcaatttctgaatcaaaggctaatgctttttcaatttcagcaggtaaagattgcattgctttgataatctcacgttctttttctacagaaatatgacctttaactttaccaagtgccgttaccagcattaataatgcaacgagctgtgtcgtaaatgcttttgttgatgccaccccaacttcaacaccagcacgagtcataaatgcaagatctgattcgcgtacgagcgaagagccagcaacattacaaattgttaataccgccatatagcccttttctttcgctaaacgaagtgcagctaaagtatcggctgtttcgccagattgagaaagggtaatcaataagctatttggacgggtaacaaatttgcgataacgaaattctgatgcaatttcaacatcacagctcactccagctaaagattcaaaccaataacgcgccaccatacctgcattataagatgtaccacaagcaacaatttgaatatgctcaactttttctaaaatgccttttgcaccattaccgattgaatcgacaatcacattttcgtgattaatacgcccttccattgtattaataagtgcggttggctgttcgtaaatttctttctgcataaaatgacggaatttacctttctctgcagcgtcattttcaagattagactcgtgaatttcacgtttagccttattaccgtgagtatcataaatatcaactgtacgacgtgtaatttctgcaatatccccttcttctaaaaagataaaacggcgagtaacacttaaaagtgcaagttgatctgaagctaagaaattttcaccgatacctaagccaatcacaagtggactaccagaacgcgctgccactaaatgttcaggatgacggctgtccattaccaccataccgtatgcgcccatgagttgttttaccgatttctgcacagcctctaaaagggaatccgtgctacgcatttcccattcaacgaggtgagcgatcacttcagtatctgtttgtgataaaaagacataaccacgagattttaataattcgcgaagttcttcgtgattttcaataataccgttatgtactacagcaaaagtacctgatgaatgcggatgcgcattagtttctgatggttcgccgtgagttgcccagcgagtatgtgcaattcccgttccaccaattaatggtttttctgatacggcttcatctaaagctttaactttgcctaaacaacgaatacgttgtaattcattttgtttattgattactgcaacaccagctgaatcataaccacgatattctaaacgatgtaaaccattaattaagatttccgctacatctcgttgcgctactgcaccgacaataccacacataagttttccttatttatttctattactaagtttgtttttacatttgccacgcgtttacacaataaaaaaaccctgcgcaatcgacagggcttcatttcattgatgttatcaattatttgattgcatcttttaatgctttaccagatacaaatgctggcactttagatgctgcgatttggatttcagcaccagtttgtgggttgcgaccagtacgagcagcacgttcatttactttaaatgtaccgaaaccgattaattgtacaggctcaccttcttttaggcttgcagtaattgcatctaaagtcgcttctaacgctgctttagcttgttttttgtttaactctgcagcgtttgcaattgcatcaattaaatctgttttgttcataaatttgtaccttctgttaaataaaaaatttgatctttaaaagtctcttgnnnnncattccattcattaattaattaatgaatgaatgnnnnntacaaaaagtatagatacgcgccccaaatttacttgattatttagatgatgaaagccgtgcgcattttgaacaattatgttcattattagatgcagtgggtattcaatatgaaattaatcctaaactcgttcgtggtttagattattacaacaaaactgtatttgaatgggtaacctccgctcttggtgcacaaggtaccgtgtgtggcggcggtcgttatgacggtttagtggaacaacttggcggacacgcaacgccaagtatcggatttgcgatgggattagagcgtttagtcttgttggtacaagaagttaatccaaatattcctgcgaaaagtgcggtggatatttatgttgtttatcaaggcgaaggcgcaacattagccgcttttgaattagcggaaaaagtacgctcggaattaccgcacttaaataccatgttgcactgctctagcggtaattttaaaaaacaatttaaacgtgcagataaatctggtgcaacattggcattagttatcggcgaaagcgaagtacaaaataaacaagtcgttgttaaacacttacaaggtggcacagatcagcaaaccttagatttagtgaatataatcgactatcttcaaactcaattttaatttaaaaggggaaaaacatggcttattccattgaagaagaacaagagattaaccagttaaaagactggtggaaagagaatggcaaaacaattattgtcgcttttatcttaggtgtgggtggtatgtttggatggcgttattggcaaacccaccaagtagaacaaatcgctcaagcttctgcacaatacgatactttaattaattctgtgcaacaagacgaacaggctaaaaaagcaaatatagaacaatttgtgcaagcgaatagcaaaactgcatacgctgtatttgctttgttagatgaagcgaaaaaagccactgaaaaacaagatttttcagcagcagaagcaaatttaaaccaagnnnnncattccattcattaattaattaatgaatgaatgnnnnntttcggattaacgggctgtattgcaccaccaaaagggttagaaaaagagcgattctcaattaattcctatcgcgagatttctcctcaggatttgacctgtcattgtaaaacagttcgacttggaggaaaaattatcaatactaccgttttagcaaatcaaacaaaaattgaagtgttaagtttacccgtatcatcaatttcaggtaaaccatttgttgaattgcaatccgatggtcgctttatcgtgtatttcaacggttttgttgagcctgaaaatttaaaagaacgttatattactgtaggtggtcaattagctggaacagagaaaggcaaaatagaacaagctgattatacttatcctgttgttcaagcggataaataccgtatttggacactcagtaccatctatgagtatccaacagatgattgggatgaagatgatgattggggattttttagatggagacatcgcccttggtatgttcagcctgaaattcactattatttgaattaaatgataaaatcttaaagattttccaacaaattaggataaaaaatggaaaaaatttggtttcaaaattatccagaaggttctgaaaaatttttggatacctcaaaatatgaatctattttggatatgttcgacaaagcagtgcgcgaacatccagatcgccccgcttacattaatatggggcaagtacttactttccgtaaattagaagagcgcagtcgtgcatttgccgcgtatttgcaaaatgaatttaaacttcaacgtggagatcgcgtggcattaatgatgccaaatttattgcaatatcccatcgcactttttggtattttgcgggctggcttaattgcagtaaatgtcaatcctctttacacaccgagagaattagagctccagttgcaagatagtggtgcggtagcgattgtcgtggtatcaaattttgcttctaccttggaaaaagtcgttttcaataccaatgttaaacacgttattcttacccgaatgggcgatcaactttcttttggtaaacgtactttagtcaattttgtcgtaaaatatgtgaaaaaactggtgccgaaatataaattaccgcacgcagtgacgttccgagaagtattgagtattggtaaatatcgccaatatgttcgtccagaaatatcgcgtgaggatttagcctttttacaatacactggcggtacannnnncattccattcattaattaattaatgaatgaatgnnnnnaaaaaatttgattctttaaaagtctctttgcgaatttgtcgcaaaaactgtgcaaaggataatctaacttgagatgaattaaaagcatgatttataaaaattgtgacaaatctcacgttattgatgaaattctataccaatgttagatataccctcagtccgaatttcattttttaaagctaaaattaattcaatatcacgtttttcacattctttaagcaaacgataaacttgccattgcacatcaagttctgtttgaatatcttcattttcttttagtttactttctgaccaatctcgtccagtttctgtttccaataatgcccttactgttcccaacgaaattaagcttatttccaccgctttttctaaggtttcgcccgcaataatggcgtgtaaaatttcagctaaagcctgacaggcatctaatgctggcacaacaccaaaactatcataatcattcacatcaggaataatcgtttccaatttttccaactgattttcaaagttgattttgacatctttaattgttaaatattcccacaccaaattgagaatattttgatacgttttggtttcaacgctaagctcgttcatttgacagaacaatttaaaatttggtgccatacgttcacataaagcagccataaaagtaagatgttgccaactttctaagttttctaagcgtttatgaatcggatttcgcatcttatttccttaattcgtaagagttggaatatttattaatcgcatttatgttccgctttacaaagttcaagcgtcgcatgaattaatttgcgagcgatagtacccgttggcggtaattctggcaagggttgatcataagaaaaccattgtgcatcataaatttcactttcctgcaatgttatttctccgctttcataatcagcaagaaagccgaccatttgagagtttggaaatgcccaaggctggctaccgaaataacgaagattttttattgaaatccctgtttcttcaaaaacctctctctgcactgcttgttcaaatgtttcccctacttcgacaaaacctgcaagcgtcgtgtatattcctccgttaggactataatgtcgcttatgatttgccaatagaatttcgtgaccacgacgaaccgcaacaataattgatgggcaaatcacaggataagtttgatacccacagtgagtacattgcactgcaagctcttcttgaatttgttgtgttttatgaccgcactttccacagaatttatgggttttcagaaaatgattaatttccacacctcggcttaatatatggaattcatcctctggcagtgaaagcaagtgactcaaactcacatattctcgttcatcactttcttgctcagccacaagccacaacggatgatttttccattctccaatttgcattgcctgtaatccttccaaatcaatatctttagcgataccaaaaggcaattcattattcactaaatacagattagaaccttgtgtaagcaaccaataaccaaaatcatcttgttgaagtattttcattttttctccataaaaataaccgcactttcaaaagtgcggtcattataaatcttcttttataactcactaataataagaatgttcgccacgttgatgctcagttatatcttttgcaccttttaattcattcgggaataagctaacaagttgtttttctacgccatcttttaacgtaacatccaccattgaacaaccgttacagccaccaccaaattgtaaaactgcgtaaccatcttcagtaatttcaattaaggttatacgtccaccgtgatttgcaagctgtgggttaatttgagtttgaattacatattcaacacgttcaatcaatggtgcatcatcagccaccttacgcattttggcattcggtgcttttaaggtcagttgcgcaccaagctcttcggtaacataatcaatttctgcttcttctaagaaaggcaaactcacttcatcaataaatgcagaaaaagtattatatttcatttcaatatcgctttcttccacggcattcggggggcaataagatacgccacattccgcattaggcgtacccggattaacgacgaaaatacgaatattcgttccttcttcttgcgtgtctaaaagttttcgaaaatgcgcttgtgcggcatcagaaatagcgatttgctgggttgcttgttccataattatgtcctaaatacttgagagaaagtatcgggaataatacgcttatcgcgcttttttttccagtgctttatattaagctcgcgccagcccccacacttggatctcctccacacctaattttcgcaacaattttgagatttcattgagtgtagaaccagtagtaatcacatcatccaccaatgctatacgacgataaggaaactcatttttcaaaacagcaagagaaaaggcattttttaaattctgacgacgatcttttgcactcaaaccacgttgagtataggtgtgtttcacacgctttacgatattgttcaaattaggaatatccagccaacgacttaattgccgagataataaatctgcctgattataaccccgtcgccactgacgaaaatgatataaaggcactggaatgattgcttctggcaatttaagttgatgcgttcgtttagcatcacgcaccgcaagatataaaagccgagctaaagtgcggtcaatccaaaattgattttgaaatttaaaacggtgaatcaatatcgaaagaggttcaatataatgcccaataatgaccatcttatcccaactaggttcttgtttaaggcaattcccacaatgctgtgcataatattgcaattccgcaccacaatgaccgcaataaggaaaagatttaatttgtttttggcaacctgaacatagcccattttttgcaatatgaagattgccacgacagtggatacagcgaaaattaaaaaaattcatcgtctaaaaaagttattttttccccgcacttttttgtttcaacgcctctaacgtttctcctgcttttaaaatatgtggcgtcacgaaaatcacgagctcacgtttttgatgtcgttcactttctttgctaaataatcgtttaataatgggtatatcgccaagcaatggcactttatcttcgcttttcgtgattgtgtcgtgaaatacgccgccaagcacaatggtttccccatctttggcaaaaacctgagtattaatttcttgcttatcaatagaaaccacctcattttgtccataagcgacacgagaaccaggggaattttgacttaccaataaatcaagtaagatattgttatctttagaaatatgtggcgtcacttccaaaccaagcaccgcctcacgaaattccacagattgcgtatcgttacgagtattactcacgatgtaaggaatttctgtcccctgtttaatgctcgcacttttcttattggtagtgagtaagcgaggacttgcaataatttctacattattttcacgctccaacgcactcaattctaaatcaagcaatcgcccattaattttggcaacttgtaatgctatagagccagcaggtgtcgtcgttgtcgcaaaatttacattaagattatccgcaatattttcaaagctattgcctgtaaggctgcccgcaactcgtcttgcattttcagttggattaaaaatcccccaccgaacgccaagttctttcaaactctcatccgtaattgtcacaattcgcgcttcaatagcgatctgttcaataggcttatccatttcagcaatcagttttttgatattttgcacagaacgaggttcatcctgaataaccagcaaattactgcgatcatcaaaggtaatgctcccatcgggagaaagcaaagatccacttcctgttgttaaggatttcattaattcagaggctttagcaaaatgaagttttaccgtgtgactcactaagtgtggttcatttgtcgtaagatttcctgcaacttgacctttgccagattggctgccgtttaaataataaactccatcatctttattcaaagtaagatgcttactttttgcgattatttttagcaaacgtggcatatcaatattgtttaatttcaaagaaatattgccttctaacctctcacccatcactaaattgacatcatgttgaaaagctaattgctctagtgtttgagctaaaggtgcttgcgataaacgaataaaaaaacgttcgttatctgttttaggattagcaaaaacgattaatggcaaacaaaaacacactaaaaaataaccgcactttaaaaaatatttcttcataatcttcctttaaaaacttaattttttccattcactactatcacattgctctcctagcttgcgcataaattgaacattgttttggttgattttttctacaatatagccctcttgagccacatcaacgccctctaaaacaatgtaaatttgcaaaccttgatcttgcaacaaggcaaaggctttatctttagaaatcactacgcccaccacttttaaagcgttcaaaggaatttcagccgcttggcgattttcatccgctccgcatagattattaggtacatctgaggaaattatttctgtttgctccattactgtttgtgcgttatcaaactgagaacggttacgctgtgttttatcgaaaggatcttgtccccaactacaattcataaaaaataatataatcaggaaaaaccaatgtttcattttgtttccttatctagctgaaaaataatctcggtttgcaacgggctgtcttctggtttgataaactgcaagcgactcactgaaagctgtaacgaattagccaaaagtgcggttaaaaatgtcttcgttttctcaaaatgacctgtaagctgtaaatgcaaaataggcttttgccccatttcccaacgtaaatgctgagataaaccgttgcgtgcagctaaacgttgaatttgtttattcaaaggaataatttgtgcagccagttctggagaaagttttcgactttccgattgctgttgtaaagaggttaaaattttctgttgatgcaacaattctgaactttttttagctaattcatactcagtttcatcaaaacgcgtgctagcctctatataatctaaaacggggcgaaaaatcaccgcacttaatagcaataaaaaggttaaaccgtgcacataaaaaggctggcttagccattttccaaaaggagtaaaaggatcgttaaaaaaagctttcatttttccgccccttgttccacatcaaagtgaaaaaacaatgtatcttgttcaggttgaacctgacttaatttcacattgggaaaatgtttctttaaaaattgatgaatcagttcaaattctgtttgatcttgtgcgttaccttccaagcttaagttattggcatcttgtttaaatttattcagttctccttgttgaaaaggtaattcacttagctgttgtaaactcttttttacttgctcgttgggaatagatgtcaaaacttcaccaactttcaccgcactgcgtaactgatcaatttgcatggtagttttgtgaagttgctgattaagttgttcaaaagatgtttgctgcgcttgcaaattttgtttctgttgttcaatcaaattgctaaaagccaacattaaattaatagcaagcaagataaataaagcgatataaaaagctaaacgacgtaaacgcttttgatgttgataagtacgccaaggcaataaattcatcgacatttaaccacccactttttgttgatgtaaatctttttgccatagcgcgttgccaagcgcaataaaagggagttctgtttctactcgctgccagttttctggtaatggcgtatgacttgagggaatttgataaacaaaaacttgttcaagttgtccttcaaaacgttcggtaaattgttcataaagtgcggtcaaattttcgtgagattgtaaaatttgtgattgctgagatctttcacaaatcgccaagcaatagtcatcttcttgaaataaaaataaggtattttctgaccgcacttgttcattcaacagatattgaaatgcacgcaaaacagcatttgacgcaacatccaatatattaatattaaatggctgaaaatcttgcaaataagtttgagcgctacttttacgaattgcagtaacctctaatcgaaaaccttgctttaacggggtagaacgataatcaaaccacaattcttctaaaaaaataggcagctctttttcaatcacaaatttacattgttgatgacattcttgcgcatttaacacttgtggcaacattaatactttcgaccaagttaagtgagcgggaatgcttgctacaaactgcaaaggaaaggttttcccttgatattgtgtttttagctgttgtaaaaaacgatttttaaaataacgatcattaacaaagatttgataactttgtggctgttcgagatcatcaaaccacacaaaatcaaaataactctgcttacgatgaatgccgatttgtaaagtgcggtaatttttcagggagaattgcatattctttcctattctttaaaggctgaatcttttatacttaacaaccaaatcataggtctcttgacaagaatattcattaacgaagcgagaattttacgatgcggatcgcaaaattaatattaaacaccctattaactttatgtattttaggtttagtagcaggcggaatgttgtatttccacctaaaatctgaattgccctcagtagaaacattaaaaaccgttgaattacaacaaccaatgcagatttatacggcagacggtaaattcattggcgaagtgggtgagcaacgccgtattccagtgaaattagccgatgtgccacaacgcttaattgacgcatttttagcgacggaagacagtcgtttttacgatcatcacggattagaccctatcggcattgcccgtgcattatttgtcgcagtgagtaatggcggtgcatcacaaggcgcaagtacgattactcaacaattagcgcgtaactttttcttaacctcagaaaaaaccattattcgtaaagcccgtgaagccgtgcttgcggtagaaattgaaaatactctcaacaaacaagaaatattagagctttatttaaacaaaatctttttaggctatcgttcttatggtgttgcagcggcagcacaaacctatttcggtaaatcattgaatgaattgaccttatcggaaatggcgattattgctggtttacctaaggcaccttcaacaatgaatccgctttattcgctaaaacgttcagaagaacgccgcaatgtggtgctaagccgtatgttagatgaaaaatacatcagcaaagaagaatatgatgctgcattgaaagagccgattgtggcgagctatcacggcgcaaaatttgaatttcgagccgattatgtcactgaaatggtgcgtcaagaaatggtgcgtcgttttggcgaagaaaatgcttacaccagtggttataaagtatttaccactgtactttcaaaagaccaagctgaagcccaaaaagctgtgcgtaataacttgattgattatgatatgcgtcacggttatcgcggtggcgcgccattatggcaaaaaaatgaagcagcttgggacaatgatcgcattgtcggttttctacgcaaactacctgattcagagccatttattcctgcggcagtgattggaattgcaaaaggcggtgctgatatattgctcgcttctggggaaaaaatgaccttatcaaccaatgcaatgcgttggacaggcagaagcaatcctgtgaaagtcggcgagcaaatttggattcgtcagcgtgctaatggggaatggcaattaggacaaattcccgcagcaaattcagcattagtttctcttaattcagataatggcgcgattgaagcagtggtgggcggatttagttatgaacaaagtaaattcaatcgagccacacaatctttagttcaagtgggttcttctattaaaccatttatttacgcggcagcattagaaaaaggcttaacgctttcaagcgtattacaagacagcccgatttctattcaaaaaccgggacaaaaaatgtggcaaccgaaaaactcgcctgatcgttatgatggtccaatgcgtttacgcgtaggattaggtcaatccaaaaatatgattgctattcgtgcgatccaaacggcaggtattgatttcacagcagaatttttacaacgttttggttttaaacgtgatcaatattttgcaagtgaagccttagcacttggcgcggcctctttcacgccattagaaatggcgcgagcttatgccgtgtttgataatggtggcttcctcattgaaccttatatcattgaaaaaattcaagataacacgggtaaagacttatttattgcaaaccctaaaattgcttgcattgaatgtaatgatatacctgtaatttatggcgaaaccaaagacaaaatcaacggctttgccaatattcctttaggcgagagtgccttaaaaccaacagatgacagcaccaatggcgaagaattagatcaacaacctgaaactgtacctgaactgccagaattacagtcaaatttcaccgcacttaaggaagatgcaattgatttaatggctgctgcaaaaaatgcttcgtcgaaaatagaatatgcaccacgtgtcattagtggcgaacttgcttttctcattcgtagtgccttaaatacagcaatttatggcgaacaaggtttagactggaaaggcaccagttggcgtatcgcacaaagcattaaacgtagcgatataggcggtaaaacaggtaccaccaacagttcaaaagtggcttggtatgcaggatttggtgcaaacttagtcactacaacttatgtcgggtttgatgataacaaacgtgtacttgggcgtggagaagcaggtgcaaaaacagccatgccagcttggatcacttatatgaaaacggctttgagtgataagccagaacgtaaattgccactgccgccaaaaattgtggaaaaaagcattgatactttgacaggtttgctttctccaaacggtggacgcaaagaatattttattgtgggaacagaaccgacacgtacctatctttcggaaatgcaagagcgtggttattacgttcctacagagttacagcaacgcttaaataatgaaggcaatacgccagcgacgcaaccacaagaactcttctaaaaatgaccgcactttagtgtgaaatcgggcgagtcaattggctcgccttcgttattaaacaaataaggaatatattatgctgagttatcgtcactcatttcacgcaggcaatcacgccgatgtcttaaaacatatcgttttaatgctcattttggaaaatcttaaactcaaagaaaaaggctttttttatttggatacgcactctggcgtggggcgttatcgtttatcctcaaatgaatcagaaaaaacgggggaatataaagaaggtattggacgcctgtgggatcaaacagatttacccgaagatattgctcgttatgtaaaaatgatcaaaaaactcaattatggaggcaaagaactacgttattacgcgggttctccattaattgccgcggaattgttgcgctcacaagatcgcgcactattgaccgagcttcatcctagcgattatccaatacttcgcaataattttagcgacgacaaaaatgtcaccgtaaaatgtgacaatggttttcaacaagtcaaagcaacgcttccgccaaaagaacgccgaggcttagtactaatcgatccgccttatgaattaaaagatgattatgatctcgttgttaaagccattgaagagggctataaacgttttgccactggcacttatgcgatttggtatcctgttgtattacgccaacaaactaaacgtatttttaagggtttagaagcaacgggaattagaaaaattctaaaaattgagctctctattcgccctgatagcgatcaacgaggaatgactgcgagcggtatggtggtaattaatccaccttggacattagaaacccaaatgaaagaaattttgccttatctcacaaaaacattagttccagaaggtactggaagctggacagtcgaatggattacaccagagtgattctccattataaacgccactaaatttcaccgcactttatagcttaaaagtgcggtaagattttctaagattttaaataaatcccacagttcccaaaagcccattttttcgctagaatgcacgcaatttttgacttaataaaggataacattatgtttggaaaaggcggtttaggcggcttaatgaaacaagcccaacaaatgcaagaaaaaatgcaaaaaatgcaagaagaaatcgcgcaactagaagtaacgggtgaatctggtgcaggtttagtgaaaatcacaattaatggtgcacataactgccgccgcattgacattgatccttctttaatggaagacgataaagaaatgttagaagatttaatcgcagctgcttttaacgatgcggtgcgtcgtgcagaagaattacaaaaagaaaaaatggcatcggttactgctggaatgccattaccaccaggaatgaagtttccgttttaatcgaacacttgtcttcccctgcttgagggggaaggtgtcgcaaagcgacggaagagggttccccctaagccttcggtagtttcccccgtaaatagagggagcggaaagtagccttatatttcatctcaaattatgcaaagcagcccacttttagaacaccttattgaaaacttacgttgtcttccaggcgtagggcctaaatctgcgcaacgtatggcttatcatcttttacagcgtaatcgtagcggtggaatgaatttagctcgagcactcacagaagctatgtctaaaattggtcattgttcacaatgtcgagactttacggaagaagacacttgcaacatttgcaataatccacgccgtcaaaattcaggtttgctttgtgtcgttgaaatgccagctgatattcaagcgattgagcaaacggggcaattttcaggacgttattttgttttaatgggacatttgtctccacttgatggtattggacctcgtgaaattggcttagatttactgcaaaaacgcttagtagaagaatctttccacgaagtgattcttgcaacaaatccaacggtggaaggcgatgctacagcaaactacattgctgaaatgtgccgccaacacaatattaaagtgagtcgtatcgctcacggtatccctgtcggtggtgaactggaaactgtggacggcacaacgcttactcactcttttctaggtcgtcgtcaaatcgactaatcttctcataccattatgcgtttatttatcgccgaaaaaccaagcctagctcgtgctattgctgacgtgctccctaagcctcatcaacgtggggatggttttattaaatgtggcgataatgatgtggtaacttggtgtgtagggcatttgctcgagcaagcagaacccgatgcctatgatcctaaattcaaacaatggcgtttagaacatctcccaatcattcctgaaaaatggcaacttttaccacgaaaagaagtaaaaaaacagctttctgtggtggaaaaactaatccatcaagcggatacacttgttaatgcaggagaccctgatagagaagggcaattacttgtagatgaagtgttcagttatgccaatttatctgccgaaaaacgcgataaaattttacgctgcttgattagcgacctaaatccaagtgcggtagaaaaagcggttaaaaaattacaacccaaccgtaattttattcctcttgccacatccgcactcgcacgagcccgcgctgattggctttatggcattaatatgaccagagcttataccattcgaggcagacaaactggctatgatggcgtgctttctgttggacgagtgcaaacccctgtgctaggtttaattgtacgtcgagatttagaaattgagcatttccagcccaaagacttctttgaagtacaggcttgggttaatccagagagcaaagaagaaaaaactccagaaaaatcaaccgcacttttcagcgccttatggcaacccagcaaagcttgtgaagattaccaagatgatgacggcagggtgctctctaaaggattagctgaaaacgttgtaaaacgtattacaaatcaacctgcagaagtaaccgaatacaaagatgttcgtgaaaaagaaacggcacctttgccttattccctttctgcgttacaaattgatgcagcaaagcgattcggtatgtctgctcaagccgtattagatacgtgccaacgcctatatgaaactcatcgtttgattacttatccgcgttctgattgtcgctatttgcccgaagaacattttgctgaacgacacaatgtattaaatgcaatttcaacccattgtgaagcttatcaacgcttaccaaatgtcatttcaactgaacagagaaatcgctgttggaatgataaaaaagtagaagctcaccatgcaatcattcctactgccaaaaatcgtccagtaaatctaacacaagaagaacgaaatatttacagccttatcgctcgccaatatttaatgcaattttgccctgacgcagaatatcgtaaaagtaaaatcacattaaatatcgctggcggtacttttatagctcaagcacgaaatttacaaacggctgggtggaaagaattgttaggcaaagaagacaacacagaaaatcaagaacccttattaccaatagtaaagaaaggacaaattttgcattgtgaacgcggagaagtgatgagtaaaaaaactcagccgccaaagcctttcacggatgcaaccttgctttccgcaatgacgggcattgcacgatttgtacaggataaagaactcaaaaaaatcttgcgagaaaccgatggattgggtacagaggctactcgcgctggcatcattgaattactttttaaacgcagttttttaactaaaaaagggcgaaatattcacagtacagaaactggaagaattttaattcaggcattaccagatattgccacccaaccagatatgacggctcattgggaatcgcaactcacagacattagtcaaaaacaagcaacctatcaacaatttatgcataacttgaatcaaatgttgcctgatttagtccgttttgtagatcttaatgcattaagacaattaagccgcattaaaatgattaaatccgatagagcgaaacctaaaagtgcggtaaaaaaatcgagtaaatcaaacggtgaaactgattaaagttaaaccaattaatattttttttatgcaaagcacttgcgagaaaattgaattttctataacattcacgaccagttttcttgcaaaattgcaaattagagagaaaaaatgtatcaagttcttttatttatttatgttgttgtcgcgattgccttgatcgggtttattctcgttcaacaaggtaaaggggcgaatgcgggtgcatcttttggtggtggtgcatcaggtacaatgtttggctctgctggtgcaggtaactttttaacacgtactagtgcgattttagcaaccgcattttttgttattgctcttgttttaggtaatatgaattcacataaaggcaatgttcaaaaaggtacttttgacgatttatcacaagctgcagagcaagttcagcaacaacaggcagctccagcgaaagacaataaaaatagcgacatcccacaataaaataggattagcataaaaattaaagctctggtggtggaattggtagacacgctatcttgagggggtagtgaccacaggtcgtgcgagttcaagtctcgcccagagcaccatttgactaaacaaagccccgcgaaactaatcgcggggttttgttttatccagttttcacaagggtttatagcactttcacccatcatatctaatcgtctttaattgtctttaattgtctttaattgtctttaattgtctttaattgtctttaattgtctttaattgtctttaatcgcaaattttagtaaccaaaatagtaaccaaaacttataatggttactaaaaccttatcagtgaaattacaagatggctagaatagtaaaacctttatctccgactgaaatcaaaaatgctaaaccaaaagagaaagaatataccctatctgatggtgagggcttattgctgctaatcttacctagtggttctaaaagctggcgatttaactacgctagaccactcactgggaaaagaacaaaaatggccttaggcggttatccagaattatcattatcagatgctcgtgctaaacgtgaagaatatcgtgtattacttgcgaaaggtatcgatccacaagaagaaaaaatacgcatccaacaagaatatgaaaaccgtttaaaagatactttccattctgttgcagaaagttactttaatggtatttacaaagaaaaagctaaaaatccagaaacacgagaaaagaattgggaacgattgaaaaatcatatcttcccttatattggcgataagcatgtatcagaaataaaagtaaaagagttagttagcatttatgaaaaaatagcagatagaagtaacacgctcaaaaaaatacatcagcttgtcggtgccattatggatcatgcgataacaaaaggtatcatagaaagtcataactgcagattggccgtgaaaaacttctatataaaatcatctacgccacatcccactattaaacttgatgaactctcaaaattattccaagacttagaaaatgctcgtatagggaaaaaaacctatttattaatttgttggtcattcttaacggcattacgcccaaaagaggcggtaaatgcggaatggtcagaaattgattttgataacaagttgtggaatatccccaaagaaaaaatgaaaggacaagcagataaaaaacgaccgcatactgtgcctttatcttcacaagcaattcagctgttagaagtgatgaaactgttttctgaaaatagttcttttgtttttgctggtcgctcatcaaaaaatcaacccatgaataaagcaaccgtaaatgttgctctaaaacatatcggctataaagataaattaactgctcacggcatccgtgcgtttattaaaacattcttagcctctcataaagttgaacgcaatgtatctgaaactattctctctcatttattagaaggcggggacgatttagaaaatacttacaatcgatataattatttagaagaaagaaaacctgtgatgcagcttatcggtgattattgtgaatcttgcggaatgaacttgaatttataattagtatattaaaaaagttttttataggttctagtcttcacctcttcacctttggcgttttctctttacaaatcaatatcttaagtgatgaatactaccctttcaacccttcaccaagtcttcaccaaaaggtgaagactcaataaaaaagcgggatttaacccgctatttttaactaaacatttcatttcgaaaactatcaaaatccttaaaatggatatttgtcctgcgtccagttttggtatgtctcttcatgaaatcatgtttattgccattctgttttaaggcttgctcaaccccaattacaaaattgttcagccctaattcaccgatattcatcgcctttgtataggctaaatatgctgggtaaaggtgcgtccttattttgtctaatcccatgtttgtaacaccaataaaaagcccatctgtttgctctgtcgtgtagaaataaccaaagaagtctgtaagtggatcagatagtttttttacttctaaggcctcttggctttccatttgtgcttttaaagcctttttcgcatcatttggatcatggaatgaatcaaacaccttgcgaataattccgcccacttctagagtgattttatccataaaatgcggatcgcgttcatcttctggtactatctttttgaagtcaaaaataacacgtcttcgatcaaccccaccagaacgctctgtaaatgaacaaggtctattatttatcaacataactagggcggtgatttttacatcaaatggatcttgataattatatctcacccttacagtatccccgccagtgatagattttaaaccgctgccgtctccagcatattttgattgttcagggcataaaatcagcgttttattttcaagtccagatagtccgcgttcatcatcaaacttttctaaattacttgatgcagtgttttttacaccagccaataaagtagcgatactggcaaacacagatttaccacttcccccctttcctgtaatttcaaagaacatttgccagttataacgattggttaagattgcatataaaacagctagaatgtttcttgctttatctttgtttccatcagatacaaagctcaaccatttgtcaaagagtggcgtatctgtcgcctgtttatcatacttatgaggaatacaagaggttagccagttttgccgattatgcgattcaaattccattgtattgcgatttaacacgccattctcaaaggctatcaaatcgttagacatttctcccattcttggcaattgggcttttaatgtcttgattaaccgctctattgtagaatcgctatagttaaattcattttcatcaagaaatttaactgccttctcttccaagtcatcattttcttgtttattccacgttttgccatcataagcatagatttctctgcaaccacgctgtagtgccatatctaaatttaaccacttttgaaaggctcgtgattttttgttcgttccgtctttttcttttagtttctctggcggtgctaattgctctgcgaggtctgctgtctctttatcattgcgtaagcgttgaatataagcacttaaatcttctttagtctgcgctgcagcatcaagaagtttgacatctattgcatcagagtttttagctaagttttggcaaatagccgttatttcagcttgcgccagctcaccatattgaacaagttttactgattgttgatcttctttgactatgcgaatagatgaaatattctctaactgtttttctgcaagaataactggttttatatttctatctaatccgtgaattaaagaacataacaagagccactcttgaccctttccgttatccaatgcttgccaggctttacgcccagcaagaataaaaatatcagagtaaggttcatgaatttgatctgcaaggtgcggtgcattgattaatttagccattgtttgcctccttactcttcatcaatccctaatccaatcctgcgcattgcttaaataaaaatgcgtccttgaactgaatcactcgaatttgagcggtagggtagagtgttttgaaaggagctatcgcctcctcagcctccgcacgttctctttttccctctgcgtgaataataggcgcacgtgcattgcctaagctaatctctagcgtgtaatgatttaaattaatggctctgatattcgtaagtttcccctgcagggtataggtgcgatgaagttctaaaatagcctctttgctttctcgcattgcaataacaatcggcataaaagaaccctcaaaaacatgaacgccagcagttaaaacaaaagcggttttactcattgctcgccccctgtaatttctcgccctcaactcgttcaatatttagtcgctcaatttgagccactacctcgccaaacttatggattagataaccgttagcctgattgaagtcttttagggtagcttgattatcccggcaaaatgttcccccttgagatttagccagtgcattaaagagcttgccacccgctttcaatcggtcgattaagtccatcatttcatcacgcattttgagcttatgatgaaaatcatcggggtaaacttctaaacacttgcgattgctgtccaaaattagtttgaattggcgcgtaagctgggcgaatttaaaggctaatggattcgcgtagagtttcccttgatatttgcttttagcctcgctacgtgcgtttccttgcgtattttgctcagaatgcaaatttacattctgtactttcacaatttgtttcgcactttcgcagtttttaaccagctcaattttgagcttgttagggtgtacgccgttgcctgataccccactatcgcttgctaaattcttagtgcggttcatttcattcacgaactgatttatctttctttgctcgttgtttttcttccactgttgaagttgttgcattgggttacttggtttcatgttgtgccacctttctaattgttgctgctttcttgatttgttcgattgatgccgccaatcctttgtagtgtccagagtgtagataatcttctgcaaaggctaagaattgtttaatccgtttacaagatttctctagctgctcgggtgtcgatgtatatggttctttgaatgctttgatttttttagctttcattttcttcccccttcaaaatcgtgatcacttctaacactcgaccgcaaatatcagcttgtcctatttcgtgcttacatttgatttttgcctgtaacgcctctctaagcgtgccatattctccctctatgaattggtcgccattgtcataaacaaagattaattgatagggtaggttcggtttaatcatcatttctttcaatctccccatctaagccaccagcaagataatattcgcttaagctggcggtttctcttaacgcattgagaagataggcgtttgccttgattaatcccccgatatgtttcacgttatcgttactcattgcctcccgtgtaaaatcctgctctgtgtcggcaagattgcctagggtttgcattaagtcgcctaagtgcattaagccatattcgatagattcgcaaagattttcagattcactgcgtaagtctgttaatttttccttactcattggtatagggatttgcttatagttgttaatgtcgttaaagtccgccatcacttgaagtgcagataaaattgattgattaaacatttgcgcccccttgtgttacaggtacagaaagggtaggaaatgtcgctaaagtgcggttatttttggggtagattttcattgttggatttccgtgtttagtatttttggaagtatcgcccatagggtgcgatacggtctcaactactccacgaaaagagcggatctgattcgtgcttaaagccttatttcgatctctcaaccgtaccgcaaattcgatataagacaacgcacccgatttttcaggaacgtgcaaggaatgaattttaggtaaaaaaataccgcattgataagggttgcggttgccctttcgtgtagtagtgctttcaatactacctgcatcttcacatttcggcaagctgtgattatttccataaattgaagaagtgcggttgtttttgagtgggttttggttgattctgccaacgaataacaaggtatcgccatcagtaaaacgtgagcgtgcttgttgttcagtatcggcaagaagtctaattttgatttgaggtgcgcgaataagcgcaaaaatgaattgatacatttgcgtaagttccatatgtttgttttcaagaactaccgctagactttccacggtcgggcggtagaacgtaacaaggtggaaaactgccacatatggaagacagccagtcaaagactgctcattacgctctaccattgagagaatgatcggatttagattgaaaacaaaatccgcattgctttgaggtgtgcgaatgttacgaataaaaaaagcacggttaaaaggcgtgctatcgttcgcctgatgtaaatagttcagcttctcacggctggcagtcgttttttgcgactgcgcgaaaactttagcaaaattgaccgcactttgtaaagcggaaatattgaaattttttgtaaattgtataaaataactatgttttgagttcatttctttttttctctacgttctttaaagattgagcgaaaaacaaaaacttaacttcaacaacaagcgtaacgcgttaagtttttattgttcaggcatgattaaagctatttgggcgagccttatagcttgataacgtcacttaggtgagccttgtggcgtttttcttttaacggaatcgaaagtaggcttgctgttcttcatgcgcagtaagctcacctcccttagccttgtaaatggcaatcacctgttttaactgttcggcatctgcgatttcatagcggtaatattgccccattccatccgcagtcttttccgttgtacgtttcactttgccggttaaatgattgcgttcaagttcactgatatagttacgcgctgacgtcatgcccattgagtaaccatcgatgccgctaatgctagaaaaaattaaacggtgtaacactttcaagaattgtgttggttttcttgcttcgttcatcttccaccaccttaagcacgtgcggctttttgttcttcaatccacgcattcacttcttctaagtcccaacggacaaagttttgtgaaaagcggatcggttgtgggaattgtttagcttttacaagctcgttgagtttggtgcgaccaaagccaacaatatggcaagcgatttcaccggagattagtttttgttgagggtttaagttttctgttttgctcataaaaaatacctatcgtttgtttaacactgtggaatagcgttctattccgttgagttgttcgaacgagaggcattaaagcaccagtaggatataagggagatatagagtggttataaaaaaatatcccccctatatagggaggatataataaaatcaatgggttagggaaaatctaatttttctttctgttgatagggcaagcgattttttctatttcttctgcggtggttcttgccacgccatactctcgtataatgtaatctcttatttgtgcgttagattttacattttcgggataatccgcccagtatttattgcgaacttcaatggcaatctttaataaatcatcattgcggtgtacgcctaatagaatagggctgttttgctcgcttatctgctgctttaactgattattttctgcttctttatctagtatctctgtttttaatttggctatttcttgttttaaattcgcttgttctctccacgcattttcagaaggaaatagttttattaaatcatcataactgatttttatatcactaaaattaactctgaaagtatgttttatatataacctttcatcttcattatattttggatattccattctaaaattaaaagaagtgaaaatatcagcttcaaaaggcgtttggacattaaattcatctaataataaataatttgtatttttcactccgtgctgtggtaaagactgattacaaaatagatctaataactcaggatgtaaaacaatatatcctttatattctgttatttttgctttattgaaagataagtataaatcatctccatcaagagttatttcattattatgaacaatactaagagaggatgagcaatcttttaaatgtaaaccgattttatcttcgcactctatggatcgttctttaaaataaatttcagaatcatcagaaataaaaaatccttctgactcatttctgcctatttttactaattgattgtctttaatctcaatttgtaataaaaatcttattttttcttcaatcgcataagaatataaaagattttcctttatagctgaattagttctttgattgataaaatcgaccgattgatttaatgaataataatcgagtggtaaaagttccataaaatgcccctttcgcattttgcccttatggtaggaacgcaccaacaagataaggtttcttgctttcggggatcagcctaggtgcgttttatttggttatttgtcttttaggtttatagtgatattgcctaatcgagtttcttttccgtcatcgctaacatgggttattgcgccggtgatgaatggtttattttgctcttgtttttgtaaaatccgttgaatgatagggcgttgtaattcctgtttggcccaatcagataatacttcgtcttgttctagtggttttggtttctcttttatcttgtatattagataacaaaagaagacgatagcgcatattagaaaagccagtaaaggccattttaatattggccaaaagatgaaagccaaaaagcctataaaaagtaatatggctaaaaataacaaaaaatctaaagcagaaaatacaaatgaaccaaatgtggataaaactgatttaatcattcttcccgcccctttgtcgccctgtttatttcttgctctattttatcaaagtttaaatgcggtaagctacgtttatttcttatttttgtgcttagattataataacttcgctacaaaattgtagtacgtaccctaaagccttttttagggaaaattttaaaaattagcaatttgataatatgtttgtgcaatgtagtcacgtataaaaaatccccacgttgtgaaacgtagggatttattttatcttcttttcgcaattcttctttctgccttcttcatatcttcaagatttttgtgcgcgatatggtaaattgtttctaacacttccatattagggctattctgcctgctatctatttcacgttttgcagcattacatttacattttaatgcgtgaataacttcacttattgcatagggttcttcatcatcgtaaaggctgacaaaggtaaaaagtgcggtcgattttttatagtgattcaccgctgaaagaagtaagttttgctttgcctgtttacatctcataaatcaatcccgttaaattgttccaatgcctgtttgtgttcttccgataactcaaaaatcagatcgccatattcaagttgataagtgccgaatgacatcaagaaagctactgccggatcgattttgtttgcggccttcttcttatttggttttatgttggcgttcgcatcggtttccatcacaacatgggataatgcccacgaaagcaccggatcgccgttatgttctatcacttggcgatttatcaatacttccgcacttttagccaccgggctaaatcgttgataggtttgcgggaatggttctacttccaagcctgctgcctgtaattgcgtgcgtaaatgcgtggcgttccaaacatcaaagccgatcattttgatattgaagttttccgcgtcttttaaaatatcatcgcggattttgtcatagtcgatacagtcgccctctgtggcaattagccacccttggcgcacccagtttcgataaatagcccggttcttgttggccacattgttaagctgaaattcaggaatataatgccgggtaatcaaccgcacttttttcccttgtgggaaggtgtaacaaaggcttgttaagtcgttggtgctagataaatccaagcctaaatagcaatcttggtgaagtaagtcgctttccgtgtaatttcgtgcgcactgcgcccaattgccttcacctagccatggcgttgttccttggcaccaaacattaaaacgcttggtaagcatttccacccactcggaaggaatccctcgggctttcttgattgtgttttcaaaatcaaggtaaggaatggatttaccgatattcggattggcttttatccagttttccggattatcaatttcgctttcttcgtccagttcaaaaatcagtacgaataagctgtcattctgctcattcccttctaagatttgggcacaataatcatagtgctgcttacaagcggaaataacgttacttcctgctgtggtaatggcaaacagtaaaccttccgggcgtgcgccttgccctagttctaatgcgctgtaaacgctgttatcagtgtgtaggtggtattcgtccacaatggcgaggcttgggttggttccctcaatggttgaggatttagccgccagcgggcgcattaggctatttgatttcggattaatcagtttatgctgctgaatattgagccgtttgcgcaacggcggggaaagtaggcacatttgacgcgcatcatcaaacacaatgcgggcttggtctcggcttactgctgccgtgtaaatatcttgttggcccgattccatcagtaggaaccaattagccaacacggcggccacggtggacttggcatttttccgcgccacttggatataagcggaacgatattttctcagtccggtatcggtgcgcttaaagcctaacagattagcgaatagaaacgtctgccagtctgaaagctcgattggttgcccgcgtaaatgccctttaacgtgcgggcataggcgggagaaagccaagaatttatttaccgcactttcatcaaagaaataagcggggttcgctaaatcgtcaaaataacgcgctacggcttgttttatcttacgacaagccactatttcacctgattgaactttcttcgcgtattcgtgccagatttccattttcgcctacattgtgaggatttcatccaacatatcagtaacgtccgtttctactggatttttacggcgacttaccgggtcaaagcccaaaagtgcggacatcttgatcatcactttttccgcatcggctttcgctgaaagtgccggattgcgtgactgtgtaccctggctgtttacaatggaaaagccgtttttcgcaatatccgctaccgcacttcggaatagtgaataattaatacagtagatttcaagattggttaaatcttccggtttaatatcgccacgatacgaaagctgcgtaatgcgtgctttccattggcttttagccagttcgtctaagaaatcgggggctttatatttagttcgtttcgtcatttttactccaattatttgattttaaagcaaagcccaaaattcggcctattagtttcttgtatagaagaatggtcattatgaccatagtttattttcaaaaaaattgccgcgcgtaaaaatttgagtgggcgggcggttccgtagggttgccactttctttttgaaattgcccccaccctctaaattgttctgtaactcattgttttataatattagacggatttccgtctttcttcgcaccaaatccgcgttggtctatcactcgtgttttatagctgtgacaatcacgacataaaggctgatgattgcttgctacccaaaacaacggatcggcttgcccgttctctaccggcttgatatggtctatcactgttgccggagtatatttgccttgctctaagcacatcacacaaaggggatgatgctttaagtattgtgcgcggtatttgctccacttgtggtcgtaaccgcgggcgctactgcttgggcgggtatccttgggcttatgctcctcgcatctacctgcctttactttgtttctacatccgggatagctacaacgtcttaacggttggtatggcatcggttactaaatccttagtaaacgcatggctctcgatacacgtcccacaaagcggaaattgtcatcggcgccggtttaagattggctaagtcggtgacggcttcgcggttggtgtaaaggtaagcaatatacattaagcaaccgaccttaatcgccggggtaaagggaacagtttgctccgtctcttcctcgccaaaggttttgccgatatgcttgcgacagacttccaatgcggtgctcttgtaggcttccaataattcatcgtccaaatcatgatcgagatttaagtgcgctttgatttcatcaatcgttaaattaatttccaccattgccagtcaactccttacagataagctgtagttctttgtgcgcttctttactatcaataatgttcattatctctagcgaacggttcccatatttcacgcgcatagtgttatcaacattagttccgtaacgtatgcgaatgcgcacagtattttcatttaatggcaccgcaccggagaagaactctctaccttgtaatggttcaaccgccgcccggatattggcaacggttttccatttactcacaataccgccgtagtcgttctgttcgttcacttgcttttgtaggctaatcaccttgttatactttccggccttaatcatgattgccatcgcttgcccccggttcttgttcatcaccgcgtttaacttctacggtttgtttccatgcttggctaaattcttctccaccctcataaggcggtaaaccttcacggcggcggacttcatttgggcacattacaccggctttaattgccacatcgtaactcttgaagcgttcgctttgacttgtgcgcaataagtcgcttgtatcaaattcaattaagtaacgtttcttgctgttgctgcctaaatcaatcatcaaggcatcttttagctgctgttcaaaattggttagccaagggcgcaaggtttgcgataaaaaggctcgactggcttcactaaagtttgaataactgctattggagtagtcttgaaggaaaattgggctaatgttgtagattctggcaatatcggaaattgtgaacgtacggcttgctaaccattctgcgtcttggtttgtcatgcctaactgtttatattccattgagccttcaaggatgggtgttttccctgcgttcttcgcgcctttgtaacgttcaagggcttttaccgctttttgtgctttggcatcgtccaaccattcggcggtagtaattaatccgctcgccattaatccgtttttcatcactgccgatccgtgtttctgttgagcgatacctaagcccacggtttcacggcaaatcgtaattggggaacgacccataaagccatcaagggatgaatggcgtaaatgtaggatttcatcttgaagatagtttttgctgttgccgtctaaatcggtaatttgatagatatactcaccgccaactttgcgatagatattgaccgcacttggttcatacggggtaaggctgaccggttcgcctttgctgttccattcaatcaccgcataagcgttaccatttaataggcagtgacgcatcatggtgtatttgaattgatacggtgtttggctacggtttggcatctcgtttaagagatagtccaccgggtgacgataaacgcgctcgcggccatcgtctttaagctgatacaaataacaaggcatactggccaccgcttctgaaataacagtaacggcactcatcaccgccggtaaactttccgccgtgttcgggctgacaaattcccctgcgccggtatttgatacaccaagataagaaagcagctcattaattgccatcggtgcgctgcgttgttcttttcgtctgaacgggttccacatattacgcctccgccacatcaagccactgtttcaaaagtgcggtggattttccttgcgtttttcccttcgcggttgccattgatcgtttggcaatctcaacgctactttcaggataggcaggaatgctggtaacggtgatttcaaataattcggctttggccactgtgcgttgacaaggctctacatcaaaattccatgtttcttctttagcccaaaagccgaaagacattccggtaatatcgccgcgttcaacacttaccaataaatcacgccctaaggtggtatcaggtggcattaattcaaaacgtaagcctattgtgtcttcttccagttttaaggttcccgcacgggtgcgccctaatagtttggaatgatcgtgttcaaataacgcccgtacatcggcaccgctgcttaaactttcactaaacgcattcgcactgaattgttctacaaaatcgcaataaagcacttcagaagggctgttccacttcaccacatagccaaccagttttttattctcgctgtctgcggtgatttcggatgaacggatttcaaattctttattcatactttcccttttaacaaaaagggggcttaattgcccccgttggaatttgacgattaagccgtaacttcaatgaatttgattgcgttactatctaccacgccaccaccaagatatttatcggtatggactttatagaagcccggttcggtaatgttatcggggcgggttcttacgccggtttcgtgatctacaatgaagtaaccgcgcttgaagtcaccaaaggcaactaccggtttattggcaccacttgccggcatggtctcaaggaagtaaaccggacgacctaaaagggtagaaggcgcatctacggttaaaccatcacgccaaataaaatcgccgtttttgtttttgagtttttgtaatgccgccgcaatagtggaagacatcacccaaacggcatttttacggtatttgctgtgtaaggtgtagaacaaatcaatgagcgtatcggcggtgattttgtcggcaccagcaacgtctaatttttgtaacttaccaaaggcgcgtactttgtccgcttcggtagaacgttcataggataagaagccttttgatttcttcgtgccgtcgccgccggttaagtcggtttcttcggtttcggtgaagctttcggtaatttcatcagtcagccaacctaaaacatcaatactggagaagtccaagatttcttgagtcgttttcggataagcatagatagggtttaacgcaatggtgacttcatggagtttcggtgtggcggtgtcattgcgggcttgaccttcctcaccatgggccactaccgcaccaccggcggaaacaagttttttgtattctttcgcaccaaccggcaagcggaccacgttacaaatttgacgcatcacgctatcatcggttaagcgtttcattacgtctttatccaattgtgggatcacggtataaccgccatcttcttgaccggtggtggaaagatttcgtaattcacccgttttaatgtagtggcgtagttcgtcattgctgaaggttttaccgcgtgtttctaccggcttgcctttgtcggcaatgttacgttcttcatcggccaccgtttcataacgggcgatttcatcgctcaattgtttaaccaaatctttcaacttttcaaagtcaacgttttcggcatcatttaatgagcggttttcttgttccgctttgtctaacatagcgcgcattgctgcgactttttccgctttttgttggcgtagttctaacagttttttaaacatagttaatccttttaaaatcatcttaattaagacggcttataaaaagcccatagaacaatatatatacaaaaaatataaagtaaacaccttaaatttcaatagtttagatacgattagatacgttgagtaaaatattttattcagtgatttttttaggtggttttgagttcgaaaagataatttaagataggaatttatctattttttataggtgaagacttggtgaagacttaaatagatagtcttcacccttataaatgtataataaataaggattttttcttatttttttagcaaaagtgaagaggtgaagactataatagaaaaaaagttttttgatatactgtaatttatcagattttgccttagtaaccaaaatagtaaccacaaataaatcaattaaaataaacttgttttaaatcaatatgttatgtaattaattcacttctcgcccaggcaccaaattaaaaaatatacagcactaaaagcattacaaagccttgattctactgaaatcaaggctttttttattccctatactccactataaaatactatcgaaccttagaattttagtaatagacttaataatatattcacgctaaggcaaaaaatctattactaaaacagcatagagacttgtaaatactaggattatcgcctagtttgttatattactaagtagggctattttatggcatacttaacaaatccgctttctgacgcccaaattaaaaaagcaaaactgaaagaaaaagattgctcctacttttacaaacgattcacgaatacatccataactaaaaggactaagccctgtagattacagagcttagtccttgatttcatagtctaactttttcaatgaaaattattttttacattcaaagtgcggtattattccgcattgtttttcgatttaataatggcgtaaaccacacctgttgataaagcaccaatcgcaattgcaccaagatatttcaacggctcagacacaaatggaatgacaaataatccgccgtgcggagcttgtaaggtaatatttaatcccattgaaatcgcaccagccaccgcaccaccaatcacagagctaataatgactcgaattggatctgctgccacaaatggtaatgcaccttcagaaataaaacataagccaagaacaaatgatgctttccccgcatcgcgttggctaacggtaaatttattgcgagcaatccaagtcgcaactgtcataccaattggaggaaccatacctgcggccattaccgcagccattggtgtataaacttgggaagcaatcaatccaaccgaaaaagtgtacgctgctttatttactggtccgcccatatcgatacacatcattgcgccgataattgcacctaaaacaatcgcattcacttcgcccattgaagtaagccaattacttagctctttcataatttcagccactggtggattgatgaggtaaatcatcgtcaaaccaacaatcatcgaacctaagagcggtaaaattaaaatcggttttaatgaagtcagacttgctggcaatcgaataataacattcagtcctttcaccacatagcccgctaagaaacctgcaataataccgccaagaatccctgcacccgcttcacttgccagcatccccgcaatcaaaccaactgcaagtcctggacgatcagcgatagaaaatgcaacgtaaccggcaaacacggcaatcattaacttaaacgccacaccactaccgatattcatcaacatattgggaagatcttgaaaaactcctgtattttcaattacattaaaactgaacataaaggaaatcgcgatcaacaatccaccagcaaccactaacggtaacatatgagaaacaccagtcattaagtgtttgtacacaccttttttctcacggctttcttctttcgttcccgcattatttccaccatcaaaaattttggcctctttaaatgctttatcaaattcttgatcggttttcttcaaggctaagcctgttgaagtgcggtacattggcttacctttaaatttatctaaaggcacatcaatatctgctgcaacaaataccaaatcagccgctgcgacttcttccacagtaatttcattgccagccccaacttggccacgggtttcaacttttacattccaaccttgctttttcgcataggcttcaatcgcttcagccgacataaacgtatgtgcaacgccagttggacaagcagttaccgcaacaatattttttacaccaaaaacacctgtaaaactcaccgcacttttcggtgcaacataatcagccccattggctaaagcatttgccagcgtgacttcaggagaaatcatggcgatagcttcgccgataataaagacttttttaccgactaacgcagggttatttggtaagacagaaccaaatacaagaacaagatctgcttcggctggtgtttctacaatagagacatttgctttttgtgcagctgctcgaaaaacttcatgtaataaataggctttcgcatcgcctacattagctgattgggttaaaaataacttcatacaatccttcaatcatcgttatttgtactttttctaaaatggggtcaagtaaactcaaatcactcacaccaacgttactctgagataccgcaaaagcggacacagccgtagcaaaagctaaagtttctgttttcgataaacctttttcaaaaccatagattaagcctgctaccatggaatcgcccgccccaacggtactcacgacattttcacattttgctggttcggctttgagcacgccttcattattaatccataaagaacctttttcgcccattgaaataatcacgttttcaatgccttccgctttgagttgctgtgcagccgcaataatttcttcaagactatttaatggatgaccaacccaagcctcaagttctcgatgattgggttttactagccaaggtttcgcttttaatccagcggtgagcgcagtattgctactatcaagcaccacttttacgccagcttggtgaagctgattcaaccaatcagcaaacaattcaggagacacacctcgaggtaaactgccacaaactgcgacaatgtcataatttaaacaataagccaaagaatccgtcacaaattgttgccaaacttgtgggcttatttgataccccaagaaatttaaatctgtcacatccgcttcagtctcggtaatttttacattgatacgcgttttgccatcaacacggtggaatttatcttccaaaccgtgctgattaaacatttgctcaaaatcagctgaattatccttgcccaaaaagccaccgactgcaacattaacgcctaaatcttttagtacttttgcgacattaatgccttttccagcagggaataagcccaatgtttctaccgtatttacttcgccaagttgaatacgatttaaacgcccaactaaatcataggcggcatttaaggtaatggttacgacgcttgccatactattcccctaaacccgattcaatcacagcactgattccgtcaatagcttgttgcgcttcttcgcccgtcgcaacaaaacgtaaacgagtccctttcactacgcctaatgctacaattttcatcaaacttttagcactgactaattgagaattacgatcaaggttttgaactgctacggaagcattatatttcttcacttcgtttaccaatattgcacttgggcgagcgtgcaaaccttgctcgtttttaatcacaaatacggcttcaatggcatttgccggcaaattatcatcttctgttaccgcaggtatgtgaatttgatcgcccataatctcaatggtatcgggttcagacggtggcactgccgaaacattctctcccaagccattggctatcgctttgcccaatgattcaatcgcttgttttgcatcttccccctctgccacaaaacgtaaacgatgaccttgtgttacaccaagcgcaacaatcttcatcaaactttttgcgctgacgacttcactttcacgagtaagattttgcatggttattttagaagtgaattttttcacttcattaaccaaatttgcacttgggcgtgcatgtaagccgtgttcattacgaatcgtaaaggttcctacaacagcaccttctacagattgagtttcaacatcactcgatgaacccaaaagtgcggtcaaaatttctgttgaatttccattgagcaaggttgtttggacatcgtcatctaataaacgcgccaaagttggattaatttgatcaccgacggctgaaacagttatcacgccttttacggccttgccattgtggctaaaaattgttttagcacgactaaatgctaaggcatttttcacatttcctacgacagagtccgttacccataaccctttgccaagtggtaatgccgcattatttatcacttcagaaataaagcgattttctaccgcactttgcacctgtaattgccccgcattaatcgcaactaaagttaataaactttgggtatttacatctaaactgatattggcagcaggaatttcaaatggatcaattgtctcgcccattaaaatcgcgcaaaattcagccacatcagttatttttgctaattttgctgcggtatcttcatcactcaaaacgtgggtaagttggcgcaataaggacaaatgctcatcagatcgcgccgcaataccaatcacgacataagcaatatttccttcgccccattctatgccttgaggaaattgaaacacttgcacgcccgttttctttaccatcgaacgagtatccaaggtgccgtgaggaatagcgatgccattgcctaaaaaggtcgaggtttgcagctcgcgcgctaacattccttgcaagtaaccattttcaacattgcctgcttgaaccaatgcggacgctgccatttcgatcgcttgttgtttatcaattgcattagcatttaaatgaatgttgctttccgaaagttctaacattcttgctccttaataatttaaaaagaaagctgcggatgaaacaaatcgaccagcagcttattgaaaaacaattatttagatgtacaggctttcagcagcgcttcactaccttgcacaatatattcatcattttctccgcgcgcttcgcctttttgtaaatcacgcatcgcatcataaataccttgagccatactttgcgaatccactttttcccaacaatttgcactcaaacgtttaaggttagcttgcaatgcttccgcatgtaacacaccactataataagcatatacatcagaatcatgtccgcctgtataaagtttatcctgaatttgtttcacaggaactaaaatacgacctaaataccagtcattcgcaccacttgcaaaattatctacaaagaaattttcattcacgcgacctttatatgtcgccacagtcgcttcataagcagctgcataagatttttgatcgattttatctttatctaaatcaatcacttttttatcgttccccataaatggaatatagttagtaaccgatgaccaagaagaacaacctgccaatattaacgtaaaaaataaaacagagatttttttaaacatagtcatacctgattaaagttaataaaacgccgccattatactgtctgagggggattaagcaaggaagcctgtaaggcttatctaggcaaatgttaatttcgtataaaatcagtaaaatcagaccattgctcaatacgaaaagcgcgaatatctcgtaccgactgagaaatccacgccaactgttttagtgcattcattgcctgaaagagattcgccatatcttcattcatgttggtatataaacttccttgtgttctaacaaaaccaaattttgctaggtttcgccaatgtctgtataagcctgttgaacaccctttggatgataatcttgagtgtcttttacaactaaatcaaaagcaatcgcgtacataattttccttattcagcttcgggatcttcaagcaggtgagataatcgataaatgtctttttctccagattgtaacaatgtgatatttaccaacacatcaccatctggcaaaaattccgcaacctcgccaaccacataaggcacgccaaattgcccgaattgcttaatacagcctgttggaatttgttgtcttagttccatatttaacctcaaattttttatggttttataacataattttgtagagaaatggataaaaatttaccgcacttctactcctgctcttttactaaagacaccaaaatctgatcgattttaaagttttccgtatcaatcacttcaaacttgtattttccgtaaaccacagaatcggtttttttcgggattttacgtaacatatacatcataaaaccaccgatagtttcgtagttttcttcatcgggaaaataagcaatatctaatactcgagttacctcttttaatggcgttgcgccatcaatcagccacgagttttcatcacggctcacaatatattcttcttcgttagaaaccaattctcccataacaatactcatcacatcatttagcgtaacaatacccactacaagagcatattcattcacaataatcgcaaaatcttcgccagtagatttaaacaattccaacacttcgtaaagagaaagcgtatcaggcacaaataaggctttacggagtagtttaggatctgtgagcaccacattttcatttttcaaatacatggtgagcaaagtatgggattcgatataacctaagattttgtcgaggccattgtcacaaatcacaattttagaatgagaatcacgagaaagcgtatccatcacttcttggcgagaaaaagtgcggtctaaatatacgatgttttcacgggttgtcattgtggaagttaccgtacgggcttgcatatcgaaaatattttcgatcaaataatgctcttgagtttttaatacaccagcttctgcgcctgcttcaactacggcgaaaatatcttcagaggtcatgccatcttcacgcacagtagaaatgcgaaatagacggaaaaaggcattagcaagcgtatcaaaaaaccacacaagcggtttaaacacatacatactaaaattcataatacccacaacgcgcaacgccatcatttcaggataagtaatagcaattcgttttggaataagatcggcaaataaaataaacaaacaagtcactaatataaaagcgattgtagaggcagttggctcaatccaatttccttcaaaagaacgatttaaaatatctgcaatgtaaggacttagcgcactttcgccaattcccccacccaaaatcgccaccatattcaacaaaatttgaaccaccgtaataaaacgaccaggatgttcttgtaatttaagcacttgaagcgcgcgcacatcgccttcatttgcaagagattgcaattttaacttacgagaactcgccagagaaatttcagcagaagaaacaactgcactacttaaaattaaagccacaattgccaaaatagtatgaaataattccataatcattactcaaaaatataaaagaaaacgaccgcactttgcgaccgtttgggatattacttatcgctgtcaaaccagccacgaataaattggatagacaaaaataatgtcgccagcaagaatacatataaaatccacgaaacaatcggattgcttggtgtttcatcagcagtaatttctttaattgaggttgcattacgatattcatccacgatcgtaatacgccaaccatagtatttaatttgcacaagtttgttgtcattacccaaagcctgcgcttcagcctgtaaattggctgagccaaatttgaagtagaacgggaacccccaacgtgtatcttcattgcgatacaccataattttaccatcgtcattttgcgtattgatgtaatacacatcacgtgttgggccatcagctggattcgattttgtgatggggccgtctttatcaacacgtttaacttctacgccagtaacacgcgtcacatcgtaatgaggaaatacataattcactacggaaaacataaaaccgtggaataaaaaaacaacaataaataagaaatatttaaaaaattttcgcatacttttcccttgtcagaactgtacatttattctacacgaattttaaataaacgctcgaaattttgtgtagtgatttgagcaaacgcctctgcagaaacgccctttaaggttgccacgtattcacatacttctctcgtatacgctggttggttttcttttcctctgtaaggcacaggcgcaagataaggcgaatccgtctccaccaataagcgttccattggtacataacgaataacctcacgaatcgcttcggcatttttaaaggtgacaatgccagaacaagaaatgtaaaatcctaaatccaacgcttttttcgcaaattccatagtttccgtaaaacaatgaataacgccaccgcacttttcagcatgatgttcgcgtaacattgcaatggtgtcatcgcctgcagaacgtgtatgaataatcacaggcttatctaattggtttgcaatatcgatttggctaccaaacaccgcttgttgcgccgctttattgtccgcactgtaataataatctaatccaatttcgccaatagcaatcactttcggatcttgcgccaaacgcaataaacgctctgcgtcataaggttcttcttcaaaatcaagtgggtgaacaccacaagcaagcgagacattattaaattcccgtaaagagtcataagcctgctcaaaacggcttaaggttacaccaatcgcgagcaaatgtttcacatcacgcgcacgtgctttttccaccacatccgagatatttttatgtaaattttcataatccaacgcatctaaatggcagtgggaatcaacaatgaacataattatttttccttatgcctaaggcttgaacgccatagacgatatatctttaatttattgcgtttcaaatacttctgtgactaatcgcgtcaagccatccaatagcattaattcaacattcacgccattaatcgtcagcaaatctgaccgcactttttgcataattttgattgattgtaataaaccaagggcagtttgctcgtcgctgaattgttcgatgccacgcccgagatcagccacttgtcgatgactatcaatttcaagtttatgctttaaacaatcagaaagaaaagccaaaatccaatccacttgctgaacatagcgttctttatcaaacaacggaagcaattccaatggcgaacgtcggcgataaaacacccaaaattgacgcaagaagtttttacgctgttcaataaatccttcttgtaaagtctctaatgctaaaagcggacgcccaagattcatcgcaagtgcggtcaaaatttcctgattttctaccgcactttctgatttcaaccaatcaagagccatttgttcattaggcacagatagattccacacttggcatcgactgtaaatagttgctaacaaacttgccgaactatccgcttgaagtaaaaaataagtatttggacgaggctcttccaatgttttcaataacgcattagcagccgcctccgttaaacgttccgcaccttgcacatacaccactttattaccattttgttgtgcgtgttgagcaaccatttcattaatgtcgcgtacttgatcaacgccaatatccttaccgtcaatggggcttaattcgtgataatctggatggctatgggcttgcattaaatgacaagaatggcattgaccacaaggtttatcgccttgagctacacacattattttctgtgcaagtgtattaaataaactctctacgcctaaaccagaatcagctttaattagcacagcatgatgccccaacccttcgtcaaaggtttgagcaatttgatgataaattggcattagccaaggataaagtgcggtcatttttcgtttgatttccaccaattttttaccgcactttcgatatcagcttgaacaagttcaatactctgctctgcattaattacgactgcttttggattatcttttactaattctaaataacttgctcgagtgcggtggaaaaaatctaaatccattttctcaatacgatctaattcaccacgtccacgagctcgcgctaaaccgacgctcggatctatatctaaataaatggtgagatctggctcaaaatcacctaatacggtttctttcaaggtgagcataaaatgcgggtctaattgacgtccgccaccttgatacgcctgagatgacatatcgtggcgatctcctaccacccattttccttgcattaaagcaggtttaatcacattttccaccaactgaatacgcgctgcataaagcattaataactctgctttatctgtcacgggttcttcgatttcatgtttgatgagatgacgtaatttctctgccaacggagttccaccaggctcgcgcgtaaacacgacatcttgaataccaagctcatgcaagactcgcacaacagactgatgagcggagcttttccccgcaccttctaagccctcaatgacaataaattttcctttcatattttcttccgcacttttatttggcatttttctgactgcgataccaacgtaaatattcttgcaccgctttattatgttcattcaaatttcgggtaaatttatgcccaccagaaccatctgcaacaaaataataaaaatctgttttttcagggttcgaaacagcctgtaacgaactttcacttggcatagcgataggcgttggcggcaatccatcaatcacataagtattataaggtgttggggtttctaaatcttttttgcgaatattcccattgtaattttcgcccataccataaattaccgttggatccgtctgtaatttcatttttgcttttaaacggttgagaaatacagatgccacttttgctctctcagtagcaatacccgtttctttttccacgatagaagccaaaatcaacatttcataaggattcgctaaaggtaaatcctcgtcacgctcgttccaagccttatttaacgcctttttcattcgctcagccgatcgcttaagtagctctaagtctgtcgatttaggcgtatagttataagtatcaggataaaaccaaccttccacattttttagttcaagattttgaccgacatctggcaaatcaagtaatgcgaaaatttcttcgttactcttatctttcaaggtttgcaccaagtgcggtgcattttcaagatcttttcgccaatctttaaaggtttttccttcaatccattttacattgaactgcacttccttaccctgaataagcaaatccagtaaatcttgcacannnnncattccattcattaattaattaatgaatgaatgnnnnntttttctgactgcgataccaacgtaaatattcttgcaccgctttattatgttcattcaaatttcgggtaaatttatgcccaccagaaccatctgcaacaaaataataaaaatctgttttttcagggttcgaaacagcctgtaacgaactttcacttggcatagcgataggcgttggcggcaatccatcaatcacataagtattataaggtgttggggtttctaaatcttttttgcgaatattcccattgtaattttcgcccataccataaattaccgttggatccgtctgtaatttcatttttgcttttaaacggttgagaaatacagatgccacttttgctctctcagtagcaatacccgtttctttttccacgatagaagccaaaatcaacatttcataaggattcgctaaaggtaaatcctcgtcacgctcgttccaagccttatttaacgcctttttcattcgctcagccgatcgcttaagtagctctaagtctgtcgatttaggcgtatagttataagtatcaggataaaaccaaccttccacattttttagttcaagattttgaccgacatctggcaaatcaagtaatgcgaaaatttcttcgttactcttatctttcaaggtttgcaccaagtgcggtgcattttcaagatcttttcgccaatctttaaaggtttttccttcaatccattttacattgaactgcacttccttacctgaattaagcaaatccagtaaatcttgcacagttttaacattctcaagagaataagtccctgcttttattttatttagctcaggtttcaacttcagcaaataaggtaataatttcccatcagcaattaacttttcttgctcaaaaagtgcggctaattttgaacctgttgtgccacgttcaatagttaaaagttgatctgcctgcacatttactggtgtttttacaaattcagtcattttgtaataagcaaaactcaccacacccgctaaaatcaaaattaaaagtaaaatcgcaattaaaaatttcttcataagctataagaaagagaaaataaaaaaacaacaaaaggggcaattaagcccctttatttttgatactttgttatttattaaaatactgaatattcgctcttttacgcaatgctttaacccaatcgttcgtcgcatcttgtaattgagtatttactaaacgttcatatgctttttgtgtgtaggcttctgctgtaagatcgccatcacgtacgccagttacttccaaaatatgccaaccaaactcagttttaaatggtgcagaaatcacaccttgtttacttttcatgacggtttgcgcaaactgtggtgcataagtttctgggaacgcataacctaaactaccgccattcgcacccgataaataatctttagaatattttaatgcggcatcagcaaaagttgttttacctgcaataatatcagaacgaattttagctaattgtttttttgcttgagcatcatttaacaatggattaagttttaacaaaatatggcgaacttcatactctttccccataactttctgtgccgtacccttttctttcgcttcttctaacattttttgaccgagtgcgacaacttcttcacgcgttacatcaatactttcttgaatagctttgttacgtacagcccccattaccatttgattggcaatttgctgacggaatgtatttaatgaaatgccttggtaatccagcgcatctaaaaattgaccataagttaaaccatttctagcagcagtgtcttccacaatatgatcaatttcacgcggatcaattttgactcccgattcttgaactgctttttgcaccaaaatatcatcaataattttatcaatcgcactttggcgatcaccttttttacccatattggcacgcacttggctttctaaaataggaataccatctactgttgcaacaacacgttccccagcttgagccatagaagcaaaagcgacacatcccaaagcagccaataaaaaagatcttaaaacaaattttttcattttcatctcatccaaaaaagagtccataacgttggttagagtaacaattctactgaaggttcacaatagataagatttatttccctaagatagcaacttcgtaacagccatcttgtttttcagtgcgaacttgcacaagttcatcacggcttgttggcacatttttacctacgtaatcagcacgaatgggtaattcacgatggccacgatcaacaaaaatcactaattcaatttttgcagcacgaccaaaatcagtaagcgcatccattgccgctcgaatggttcgaccagtaaacaacacatcatcaaccaaaatgacggttttatcttgaatattcaaatattgtgatgaaccactataaactggcattttatcttcctgatcaaccaaagttaaatcatctcgataaaaggtaatatccagttccattgaaggtaaatttataccacttaactcttcaactcgacgttgtaataattctgcaatttccgcaccacggcgtttaatcccaacaataacaagatcatctaaggtttgatgtttttcaataatttcgtgagaaatacgcgaaattgtgcgaagaaaacgatcatgatcaataataattttttccatttttcccagctttatcaatagtatttcaatgcacaaagtataaagaaaatacgcctaaaaagcgacggcatttgcaccatttttcttgttcgttatactatccaaaacattccatcaaaggaaaccaaattatgcgctactccattcaagattttattcaactcatcgcccaacttcgcaatccaaatggcggatgcccttgggatttaaaacaaaattatgaatctatgatttcttgtttaacggaagaaacttacgaagtaatcgaagccattgagaaaaaagacataccaaatttacgtgaagaattaggggatttattgttgcaagtcgttttcttcagccagcttgcaacggaagataaatactttacttttgacgatgtgttacaagatatcgctgaaaaaattgtacgccgtcatcctcacgtgtttggtgatgcaaaagcgagagacgaaacagaagctctttcccgttggaatgaaatgaaagccaaagaaaaacaaggtaaaagtgaagaaacctctattttagataatgtgcctcgtgctttgccttctcttacacgagcagcaaaattacaaaaacgttgttcaaaagtagggtttgattgggaagaaatttcccccgtatttgacaaagtgcgggaagaattagaagaagttcaagctgaaattaaccgcacttcgattgaacaaaataaagtcgaagaggaaatcggcgatttattgttcgcaaccgtcaatcttgctcgccacttaaaatgtgatcctgaagatgcattgcggaaagcaaatttaaaatttgaacgtcgttttcgagcagtagagcaagcggttcaacaacaaggtaagcaagtgaataatgtgccacttattgaattagatttgttgtgggatgaagtgaaaaaacaagaaaactaattgaaaagtgcggtaaaaatttctctcattttttaccgcactttcttcttttaccgcactttcttcgttaaagttgctgaatatccagtgccatttggtctaacatttcataacgtttacgatacatagaacgttttttacttgcgatatcttctaattgtttgcgttcaatatgcaaaggtaattgccaatagttatggcgatattctccttggttttcttgccaaaattcatcgtaattaaacaaaatcttactgcgcgcagaaagacgatattttccttgcgctttgtgcggaatgcccactaactcacattgccatttttcagcgagcattttgaacccattaaccaacataaacattggacgcataccgtgtaatgcttttgtagcctgttttacaagttcttgtgcattgtcgcttgaggggccttgaattgaggcgataagcaatttattcgggcttaaaaaagtgaaagacgcatcatatactcgttcgttattttgattgcgaatattaatagaaaaatatccttcaaagggatcgatatgattaatactcaacgataaacgcaaatcctcagttaattgggttagcacgatattttgttgatctaataattgctgacaaagcgaacgtcccattttttcttctgccaaacgtaaattctccgtaatcgccgttaaacgttctgaagcagaaaaacgtttatcgcaaaaggtcgtcagaattgtattagtacgataataatcttgtgtaaataaagactgccattgcgtttctgtattaaggaaatccactaattgatgacattgcttttgatataaccatttatagccataatagcgtaatttttcccgcacttgtttaagaaaagggcgatccttagaataaggatacatttgaacgtaagtggggaaaataaaatgatttttcgtggacataactcaatattttgtgaaatttaataaaatttttcgttattttagccattatcacttcatttgccaaaattcttttttgtttaaaacccactttataactcagattttgttataatcttttccttgaattcctttttccctaccccaatatttacccaaattatcggaacgaaattataagagagaccaattatggcgaagaatacccaacgtacaatgcccgtattgccattacgcgatgttgtcgtttttccttatatggtgatgccactttttgtagggcgcgcaaaatcaattaatgcccttgaagaagcgatgaacgatgacaaacagattcttttggtatcccaaagagaagcggatttggaagaacctacccctgaagatttatttgatgtgggtaccattgctaacattattcagttattaaaattacctgatggcacagtaaaagtgctagttgaaggtcaaaatcgcgcgaaaattaacagccttgaagacggcgaaaagtgtttttccgcccaaattacccctatcgaaaccacttatggcgatgaaaaagagttagtggtggcaaaaagtgcggtactttctgagtttgaaaattatcttaccctcaacaaaaaagtgcctacagatattctcaatgcccttcaacgtattgatgatgttgatcgcttagctgacacaatggctgcccatctccctgtaagcattcgccataaacaaaatgcattagaactcgctaatgtgcaagaacgtttagaatatttacttggtatgatggaatcagaggctgatattctccaagtggaaaaacggattcgcggtcgtgtaaaaaaacaaatggagaaaagccagcgtaactattatttgaacgagcaaattaaagccattcgtaaagaaatggatggtggcgaaaatgaagataccattgatgaagttgaacaactgcatcaaaaggtggaagcggcaggcatgccagctgatgtacgcgacaaagtagaaaatgaattacaaaaacttaaaatgatgtcagccatgtcttctgaagcaacggtaatacgcagttatattgaatggatgatccaagtgccttggcatcaacgttctaaagtgaaaaaagacattgttaaagcacagcaagttttagataccgatcactatggtttagatcgcgtaaaagaacgcattcttgaatatttagcagtacaagcgcgtttaaacaaagtgaaaggcccgattctttgtttagttggccctccaggtgtaggtaaaacttctcttggtcagtctattgccaatgctactggtcgtaaatatgtacgtatggcattaggcggcgtgcgtgatgaagcagaaatccgtggtcaccgtaaaacctatattggtgcattgccgggtaaattaattcaaaagatggcaaaagtgggcgtaaaaaatccattattcttgcttgatgaaatcgacaaaatggcatccgatatgcgaggtgatcctgcatcagcattgcttgaagtattagaccctgagcaaaacaccacatttaacgatcactatttagaagtggattatgatctttctgatgtgatgtttgtagcaacatcaaactctatgaatattccaggtccattattggatcgtatggaagttattcgtctttctggttatacagaagatgaaaaacttaatatcgcaatgcgccatttattagcaaaacaaattgaacgtaatggtttgaagaaaggcgaacttaccgtagaagaaagtgcaattttagatattatccgctattacacacgtgaagcgggcgtacgtggattagaacgtgaaatttcaaaaatctgccgtaaagccgtgaaaaatttattagtaaatccaaaacttaaatctatcacggtaaattcagataatctgcacgattatcttggcgtaaaacgttttgaatttggtaaagctgacacgcaaaaccgcattggtgaagtgactggtttagcttggacagaagtgggcggcgatttactcactattgaaactgcctctgttgtgggcaaaggaaaactttctttcactggttcattaggcgatgtgatgaaagaatccattcaagcggcaatgaccgttgtgcgtgctcgtgcggataaactgggtatcaatgctgaattccacgaaaaacgtgacattcacattcacgtgccagatggtgcaacaccaaaagatggcccaagtgcaggtattgcaatgtgtactgcattaatttcttgtttaacaggtaatcctgtgcgtgctgatgtggcaatgacgggagaaatcagtttacgtggtaaagtattaccaatcggtggattaaaagaaaaacttcttgcggcacatcgtggcggaattaaaaccgtattaatcccaaaagaaaacgttaaagatcttgaagaaattccagaaaacgtaaaacaaaatcttgcaattcatgcggtagaaaccattgatgaagtgcttggttttgcattggaaaatccaccagagggcattgagtttgttaaagtggaggctaaacctaaagcaccacgccgtaaagtgacgagtaaatcagaaagagcggtcaattaattgaatgttttagggcttgtgaaaacaagcccttttattgattttagagatgataatttcatctttacacaaggttaatttatacttttccaaattgaaaacttgttaataacacaatgccaaaacttcctccactttccctttatatacatattccttggtgcgttcaaaaatgtccttattgtgattttaattcgcacgcacaaaaaggcgatataccagaacaagactatatttatcatcttctgcaagatttgcaggctgatttgcaacgctttaaagattctattcaacaacgaaaactccattcaatttttattggtggcggtacaccaagtttgttctcggcagaaagcattgcgtatctcttaaaagaaataaaaaaacagattgattttgaagataatattgaaatcacattagaagctaatcctggcacggtagaagctgaacgttttaaaggttatgtatccgcaggcattacgcgaatttctatgggaattcaaagtttcaatgatgataaattacaacgtcttgggcggattcataatgcagcagaggcaaaaagtgcggtcaatttagcgaaagtttctgggctaaaaagtttcaatttagatttaatgcacggtttgccgaaccaaacgttggaagaagccttagatgatcttcgtcaagcaattgagctatctcctccccatatttcttggtatcagctgactattgaaccaaatacgatgtttgcttatcgcccacctaaattaccagatgatgacgcactttgggacatttttgagcaaggtcaccaacttttaaccgcagcgggctaccagcaatatgaaacgtctgcttacgcaaaagcgggttttcaatgtaaacataatttgaattattggcgatttggggattatttagccattggctgtggcgcacacgggaaattgacgtttccgactggcgagattactcgcttttctaaaaccaagcacccgaaaggttatttacgtggcgaatatctttacgaagaaaaaaacgtgccaaaaattgaccgcccttttgagttttttatgaatcgctttcgtttgttagaagcggtacccaaacaagaatttgaagattacacaggcttgtcgcaaagtgcggtgaaaaatcaaattgattttgccattcaacaaaactatattgtggaaaacgctgattcttggcaaatcactgaacacggcaagttatttctcaatgaacttttggaattatttttaacggaatcatagttcatccgttaaacctctcattgctgaaaaattacacttgtttattaaatactctcgtaataaagtaacacaatcgtttacttattaagataaggaaaagaaatgaatcaattagaaatgaaaaaactcgccgcacaagctgcattacaatatgtaaaagcagatacgattgttggggtgggaagtggctccacggtgaactgctttattgaggctttgggtacaatcaaagataaaattcaaggtgccgttgcggcttcaaaagaatcagaagaattattacgtaagcaaggtatcgaagtatttaatgcaaatgatgtatctagcttagatatttatgtggatggtgcggatgaaatcaatccacaaaaaatgatgattaaaggcggcggcgcagcgctcactcgtgaaaaaatcgtcgctgcattagcgaaaaaatttatttgtattgtggattcgagtaaacaagtggatgtgttaggttcgaccttcccattaccagttgaagtgattcctatggcacgctcacaagtaggcagaaaattagccgcacttggtggctcacctgaatatcgtgaagacgtggtgacagacaacggcaatgtgattttagatgtacacaacttcagtattttaaatccagttgaaatggaaaaagaattaaataatgttgcaggtgtcgtcactaatgggatattcgcattacatggtgcagatgttgtgatcgtcgggacgcctgagggtgccaaagttattgactaattcataataaaaatcataaggaagcaaacatgacaaacaaagtctctctagacaaatcaaaaatcaaatttgtattgtttgaaggtgtgcatcaaagcgcacttgatacgctccatgcggcaggctataccaatattgattactataaaaaagcactagatggcgatgaattaaaagaagccattaaagatgcacattttatcggcttgcgttctcgcacccatttaacggcagaaatgattgaggccgcacccaaattaatcgctgtgggatgtttctgtattggtaccaaccaagtggatttaaatgcagcaaaagcgcgtggaattcctgtatttaatgccccattctcaaacactcgttccgtcgcagaactagtattaggcgagattttattacttatgcgcaatgtgccacaggctaatgccgaagtacatcgtggtgtctggaataaatccgcgacgggatcttatgaagtgcgggggaaaaaattaggcattattggttacggtcacattggttcacaattaagtattattgctgaatcattagggatggatgtgtatttctacgatattgaaaacaaacttccactcggtaatgccaaacaggttcgtagccttgaagaattactcagttcttgcgatgtggtttcattacatgtgccagaactgccctctaccaaaaacttaatgaacgcagcacgtatcgcacaattaaaacaaggggcaattttgatcaatgccgcgcgtggcacagtggtagatattgacgctctcgctcaagccttaaaagatgggaaacttcagggtgccgcaattgatgtattccccgttgagcccgcttcaattaatgaagaatttgtctcgccgttacgtgaatttgataatgtgattttaacgccacatatcggcggctcaacagcggaagcacaagaaaatatcggttttgaagtggcaggcaaatttgtcaaatattcagacaatggatcaaccctttcttcggtaaacttcccagaggtctctttaccagaacacgagggaacaaaacgcttattgcatattcacgaaaatcgtcctggtatattgaacaaactgaaccaaattttcgtcgaagctaacctcaatattgcagcgcaatatttacaaactgacccgaaaattggttatgttgtcgtagatgtagaaacgaatgatgcatcgccattactgacgaaattgaaggaaatagatggtacaattcgtgcacgagtgctttactaaatagaaaaaagatcaggttaatgcctgatcttttttgctttcttattcagtaatcgaataaggtaactgcactcgctctaacaatatttcattattcagcaacctaaatttttgctctgaatcaatgtcgttattcatcacaacttgcaaccataaaacaccgtctaaattgaccgcacttgtaatcgtgccagtcttacgccaattggcttcaagctgcatttcaatttcactgccaattttcgcttcctgctgagtttgcgctttaaaaataaacattgcgcgtttgtttgcaccacgatatttcgcacgtgccaccgtttcttgcccaatataacaacctttggtaaaagaaatggcttgctcaatagcctgtaaatttagggcttgtgggataaattcattttgcgtttgcggacttaaatttggcaatcctgcttgaatatcagctacttcccaaattttttcatcgccattaaaattcacgggcaattcagtttcattcaataaaattgaacgttgttcatcaatttctaatgaaaagtgcggtgtaatttttccacatttttcacctattacgccaatgatttgccaatcacgtaaatcaaaactaactttggaaaataccgcatattttttcaaagcatccagaccgcttggcaaaatatctttcttaacgagtaaaaagaattgttcactacttactttaaacaaacgataaattgcattcattttaccttttgggtcacagtgagctgtaagcgtcgttgcgccacttgctaatcgcacaacatcagaagttaattgcccttgcaaatatttttctgcatccgcaccctgtacttcaatcagctgatattgagtaagagaaataaattgagacattctgctttcctattctaaattctgaatttgctcacgcatttgttcaataagcacttttagctccaccgcagaagccgtgatatcggcattaatggatttagacgcaagggtattggattcacgattcaactcttgcatcataaaatctaatttacgtccaactgcaccgccttttttcaaaatattcgtggtttctttcacgtgcatttgtaaacgatctagctcttccgccacatcaacgcgttgagccagtaaaatcatttcttgttccacacgttgcggatcaagattaagttgagcatcttcaaaacgttgcaataaacgttcacgctgccattgtaaaactgctggcatttgtgaccgcactttatccgtttccactgcaatggaatctaaacgttgttgaataatgtcgttcagtttttccccctcacgaccacgcattgcaataaaatctgtcagtaaatcatcaaaggctgtcaataaatcttgactaatcgcatctaaatcttgctcttgcgcttccaccacaccaggataacgcaacacgtctgtcaaattaatttccccttctccagcctgagctttaatccattgcaaagattgaatcacttgattcgcaagctctttatttaaattcaactcagcatttgcttgtttttttgtttcaatacgcaaagaacattcaattttaccgcgagtaaggctttgacgaagtttctcacgcaacgtgttttctaatccgcgaaattgctcgggcaaacggaaaaagttttctaaataacgttgattaacggaacgaatttcccataccgcatcaccccaatcttttttcacttcaaggcgtgcaaaggcggtcatactgtaaatcataagctctcctattttctcttagctttgtcttagttgattcactaagtattgtaacgagatgaacacagaaagggaaaagaaaattaacacaataaaaatctggaaaattatacctcttaagtaaacatttttgataaattttaacgatcgtaaaaatgtactaaaaacacaattttttcaaaaaaattgctttttttaattttaaagtgtatttttaaggcaatataaaatctaataacatttgagcgagcatatacaatatgaattttatctgcacttaccatcatcaccacacctgattatctttcaggcgtgattgtatgtttggaagataataaaatatcttccgagtgtgataaaaatcagtgtaaaagcaataaatacccccctcggaaggcaattttcgagggggtttcttttatctcaactttaaaataggaaaaacattatgacaaacacaacaatgcaaccaaaccgccttcgtattgctttgcaaaaaaaagggcgtttaagccaagattgtgccatattacttaaacaatgtggcgtgaaaattaattggaatgaacaacgtttaatcgcttatgcggaaaatttgccgattgaaattcttcgcgtacgtgatgatgatattcctggattgatttttgatggcgtagtggatcttgggattattggcgaaaatgtgttagaagaggaagagcttggtcgccgtgcagcaaatgaaaccgttacatacaaaaaacttcgccaacttgattttggtgattgtcgtctatcacttgcggttgatcgcgattgtcattatgagaatgtgaaagatcttgctaataggcgtattgcaacttcttacccgcatttactcaaacgttatatgaatgagaatggggtgtcgtttaaaagttgtttattaaatggttcagtagaagtcgcacctagtgcgggtattgcttatgcgatttgcgacttagtatcatcaggggcaacgcttgaagcaaatggcttaaaagaagtggacgtgatttatcgttctaaagcttgtttaattcagcgtgctgaaccgcttgaatcaactaaacaagctcttgtggataaactactcactcgtattcaaggttacagcaggcagcagaaagtaaatnnnnncattccattcattaattaattaatgaatgaatgnnnnncacttaccatcatcaccacacctgattatctttcaggcgtgattgtatgtttggaagataataaaatatcttccgagtgtgataaaaatcagtgtaaaagcaataaatacccccctcggaaggcaattttcgagggggtttcttttatctcaactttaaaataggaaaaacattatgacaaacacaacaatgcaaccaaaccgccttcgtattgctttgcaaaaaaaagggcgtttaagccaagattgtgccatattacttaaacaatgtggcgtgaaaattaattggaatgaacaacgtttaatcgcttatgcggaaaatttgccgattgaaattcttcgcgtacgtgatgatgatattcctggattgatttttgatggcgtagtggatcttgggattattggcgaaaatgtgttagaagaggaagagcttggtcgccgtgcagcaaatgaaaccgttacatacaaaaaacttcgccaacttgattttggtgattgtcgtctatcacttgcggttgatcgcgattgtcattatgagaatgtgaaagatcttgctaataggcgtattgcaacttcttacccgcatttactcaaacgttatatgaatgagaatggggtgtcgtttaaaagttgtttattaaatggttcagtagaagtcgcacctagtgcgggtattgcttatgcgatttgcgacttagtatcatcaggggcaacgcttgaagcaaatggcttaaaagaagtggacgtgatttatcgttctaaagcttgtttaattcagcgtgctgaaccgcttgaatcaactaaacaagctcttgtggataaactactcactcgtattcaaggtgtacagcaggcagcagaaagtaaatatattatgctccacgctccgaaagaaaaacttgaaaaaatcactgcgcttttacctggcgttgaaaatccgaccattttaccattagccactgatacaactcgggtagcaatgcacgtagtgagccaagaaaatttattttgggaaacaatggaacagttaaaagaggcaggagctagttcaattttagtgttaccaattgagaagatgatggagtaaatgtagtgcgagctttgactcgccatttaaataatcaatatctcaaaatgctgggttatcatccattttacggatacaaaggaaaataaacaatgcaaacaattatttggaatcatttatcagaaactgaaaaacgcaaagtcattatgcgtccagtccaacaaaatgggaaaaacattcagcaggcagttaatgccattcgtgaaaatgtggcatacaatggcgatcgggcgttatttgaactctgtgaaaaatttgatggcgtgaagttagataaactcattgtttcggtagatgaaattcaagcggcaagtagtcggatttctgtaaaacttcgcaatgcgattgagcaagccaaaacgaacattgaagcctttcacaaagcacagcaaaatcaggaaattgacctagagatccaagaaggcgtgcgttgccaagttgtgactcgtccaatttcttgtgtagggctttatattccaggtggttcagcaccgctgttttccaccgtattgatgttagctattcctgctaaaattgcaggttgtaaaaaaatcgtgctttgttcaccgccaccgatctcagatgaaattctctacactgctcatctttgcggtgtggaaactatctacgctataggtggtgctcaagcagtttttgcgatggctcaaggcacggaaagtgtggcgaaagtagataaaattttcggacctggaaacgcatttgtgacagaagcaaaacgtcaggtagcacaaaatagtacggcgattgatatgccagcgggaccttcagaagtgttagtaattgcagatgaatcggcagatcctgaatttgtggcaagcgatttactctctcaagcggaacatggggcagatagccaagtgattttggtggcgacctgtcaaactctggcaaaagagaccgcacttgcgactgaacgccaacttgctctattacctcgtgctgaaaccgttcgaaaagcgttaaaccacagccgtatttttatagcagaaagccttgaacaagcggtagaaattagcaatgaatatgcccctgaacatttaattgtgcaaacaaaaaacgcccgtaaattattaccatatttagataacgcaggctcaattttcttaggtgcatattcgcctgaaagtatgggcgattatgccagtggcacaaaccacgttttgcctacttatggttacaccaaaacttattctagtctaggattagctgattttagtaagcgaatgacagtacaagaactcacaccaaaaggttttaaaaaccttgctgaaacggtggaagtgatggcagaagctgagcaattggcagcacataaaatggcagtaagtgtaagattggcgaaactcaatatctaagatattaattgtagatctaagcacgacacgtaagcagtcaaattttcatacaacaatacgaaatatgtatgaatgattacaattcgcacattttacaatggaagaaaacaataatgacaatcacaactttatcccgacaaaatatacaagccttaacgccatatcaatccgctcgaaaactcggcggcaatggtacgatttggctgaatgcaaatgaatatccaacttcacctgaatttcagctttcgggtaaggatttaaaccgctaccccgaacctcagcctcaaagagtggtacaggcttatgcgaattatgcgggcgtttcaactgaaaatgtactcgttactcgtggcggtgatgaaggcattgaattaataatccacactttttgcgaacccaaacaagatgccattttattctgtcctccgacttacggaatgtatgcagtgagtgctgaaacggcaggtgtgctaagtaagaccgtgcctttaactgacgattttcagcttaatttgccagaaatcaaaaatcatcttaatgatgtaaaagtagtctttgtatgcagcccaaataatccgacaggtaatttgctcaagcaatcagatatactcgatcttttgcaaatcacggcaggcaaagcgattgtggtggtggacgaagcctatattgagttctgtcctgaagcaagctttattaatttgcttaaaaattacccgcacttagccattatccgcacgctctctaaagcctttgctttagctggattgcgttgtggttttgtgttagcaaaccctgcgctaattgacatcttaagtaaggtaatcgctccatatcctatccctgtgccaagtgctgatcttgcggaacaagcgttaagacctgcgaacatcgccactgttcaagctctcacacaagaacttctttccaatcgtcaatggcttgctaaagctcttttagttttacatcaagtggaaaaagtgtatgaaagtgaagctaattatctgttgatcaaatgtcaaaacgggcaagctgtgtttaaggcattgtgggaacaaggaattattttaagagaccagaataagacattgcatttacaaaattgtattcgcattactgtgggaacaaggaatgagtgtgagagagttgttgaagcaattaaggaggtaaaatgaaccacctcctatttaagtcacagagcgattcgagattatttagttttatactgtttgtataaagcaaatgataaacctcataccattcatataacatacacggagaaaaatatgcaacctactctttttatcgaccgagacggcacattaattgatgaaccaaaaactgatttccaaattgacagtttagagaaactaaaattagaaccgaaagtgattcccgcactcctcagactgaaagcgaaataccgttttgtgatagtttctaatcaagatgggcttggtacggatgcttttccgcaaacaaattttgataaaccccacaatgtaatgatggcattatttgaatctcagggcattacctttgatgaagtactcatttgcccgcataagcccgaagaaaattgtctatgtcgcaaaccaaaaattaagttgcttgatcactatattcgtaaaaatttattcgatattgaccgctcttttgtcattggtgaccgagagaccgatgtgcaattagcagaaaatctaggtattcgagctattcaatacgatccacagaaaatgaattgggatctgattgcagaaaaattgttgggggaaacggtcacaaactgtggcaaacgtccgccacgttttgcagaagtaattcgtcaaactaaagagaccgatattaaagtgcaggtttggctagatgaagctggtgtaaatgaaatcaaaaccggcgttggtttttttgaccatatgctcgatcaaatcgccacacacggtgggtttagaatgaacgtgcagtgtaaaggcgatttatggattgacgaacatcacacggtggaggacaccgctctcgcccttggacaagcactgaaacaagccattggtgacaaacgtggtattgcccgtttcggctttgtgcttccaatggacgaatgtaaagcagaatgtgctttagatttatcgggcagaccttggatcaaattcaatgcctgctttaaacgcgataaagtgggcgattttagtacggaactcactgaacatttctttcaatctttggcattttcaatgcttgccacgcttcatttaaatgtcatgggtaataacgatcatcataaaatagagagcttatttaaagcctttgggagaacattaagacaggcgattcggattgaaggaaatgaaatgccaagttcaaaaggagttttatagttgaaagagcggttaatttttgtcgtatttttgcaaaattcgaccgattgtaaaaggataaaaaaatgacaaacatcacgattatagacacaggttgtgccaacctttcttctgtaaaattcgcctttgaccgattaggttacaataccgagatcacttttgatcttaataaaatcaaatctgccgataagctgattttacctggcgtaggcactgcaaatgcagcaatgtataatttacaagaacgtcaattgatcgaaaccattcaaaatctaacacaaccagtgctaggaatttgtttgggtatgcagttaatgaccgaattttccgaagagggtaatgtgccgaccttaaacctaataagcggaaaaactaatcgaattcccgatacgggtttaccgttacctcaaatgggatggaatcgcgtgcaatttgtaaaaaactgtccgttatttgatggtattgtgcaaaatagtcacttctattttgtgcatagttatgcagttagcccgaatgaacattcggtggcaataagcaattatggtgtgaatttttctgctgcgatagcgaaagaaaatttttacggtgtacaatttcatcccgaacgttcgggtaaaaatggtgcgttgttgctaaaaaattttgtggaaaaagtaccgttttaatcactagatcatatagtcatacaggatcaaacataatgaaacaatctattattatccctgctcttgatcttatcaatggtcaagttgtgcggttacaccaaggcgattatgccaagcaaactacctattctgacaatccaattaagcaatttgataattatgtacgtcaaggagcaaaacaactacatctagtcgatttaacgggagcgaaaaatccccaatcaagacaaaccgcacttattggaaaaatcgttgaagcaacacaatgtaaagtacaagtgggaggaggcattcgtacagagcaagatgtggcagatttattggctgtgggtgcgaatcgcgtggtgattggttcaaccgccgtaactcatcgttcaatggtaaaaaactggttcatcaaatatggtgcggaaaaatttgttctagcattagacgtgaatattaatgcaagcggtcagaaaattgttgcgattagcggttggcaggaagaaagtggtgtactattagaaacgttgatcgaagatttccaaaccgttggcttacaacaagttttatgtaccgatatttcacgcgatggcaccttgacaggttcaaatattggactttatcaagaaatttgtgagaaatatccacctattcagtttcaatcttctggagggattggttcactggctgatattgaggctctaaaaggcacaggtgtgtcaggtgtaattgtaggtcgcgctttattagaaggaaaatttacgctttcggaggcaatcaaatgttggcaaaacggataattccttgtttggatgtacgtgatggacaggtggtaaaaggggtacaattccgtaaccacgaaattattggcgatattgtgccacttgctcaacgctatgcgcaagaaggagctgatgaattggtattttatgatattacggcttcatcagacggtcgtaccgtggataaaagttgggtagaacgaatcgctcaggtaattgatattccgttttgcgtagcaggtgggattaaaaccattgaagatgcggaaaaattgtttacatttggggcggataaaatttcgattaattcccctgctctcgctgatccaacgctcatttctcgcttagcagatcgttttggcgtacaagcgattgtagtaggtattgatagttggtttgaacaggaaacaggtaagtattgggtaaaccaatatacaggcgatgaaacacgtacccgacaaactcattggcagttgttagattgggtaaaagaagtacaacaatgcggtgcaggagaaatcgtgctaaatatgatgaatcaagatggtgtacgaaacgggtacgatttagcccagctcaagctggtgcgaggagtatgtagagtacctctaattgcatctggcggtgcgggtaaaatggtacattttcgtgatgcttttattgaagcaaaagttgatggggcattagctgccagcgtattccataaacagattattgaaattggcgagttaaaatcctaccttgtgaaatcagccatcgagattcggagtgaataatgaatattactaaaatagactggcaaaaagttaatggtcttcttcctgttattattcaaaatataagtactcgtgaggtactaatgcttggctatatgaatgaagaagcccttacaaaaaccatcaaagaacgtaaagtaactttcttctctcgtaccaaacaacgattatggacaaaaggagaaatctcgggcaattttttaaatgtggaagaaatgagcttagattgcgataacgacactttgctcattttagttgatcccattggggcaacttgccacacaggtgaatacagctgcttccatcaatttacctctccacaatcagagaacaagaagcaacaatttgcaaattgggcgtggtttataaaattagaacaacatttaaaagaaaagaaaaatgcagatccttctaattcttatactgcaacattacacgcaaaaggtaccaaaaaaatcgcccaaaaagtgggggaagaaggtgtggaaactgccttggctgcggtcgcacaagataaagcagaagtcatttctgaagctacagatttggtctatcacttaaccgtattattacacaatcaagatcttcagtggtacgaaattatcgcaaaactacaagaacgccatcaagggattggattacatccagaaggaggaaataaataagaaaattgtcaggcaatattaagtgagcaattagaagatttgtttggacaattcaatatcatcgtaaaatacagtgaaactgtggtaattaaatgtattgataaacaacaaaatttaggaaatatcattttattccttcttcttaagcaacaatatagcaaggaagatagtaaaaaattcacaatttataaattttatttacagactgtaaattatacaatacaatcatcgtaaattttttattacatcataaggaaacaaaaatgaacaaaactgtaggcagcacacttcttgttgctggtacgatgattggcgcgggaatgttggctatgccactcacttccgctggcattggcttcggctttactttagtcttgttattggggctttgggcattattaacttttagcgcacttttattcgttgaactctatcaaactgcggaaagtgatgcaggtatcggcacacttgcagaacaatattttggtaaagcaggacgcattattgccacagccgtgctaattattttcttatatgcattaattgccgcttatatcagcggtggcggttcactactaaaagatttattaccagaaagttttggcgataaagttagcgtcttattatttaccgtgattttcggttcatttattgtcatcggcacacatagcgtagataaaattaatcgcgtgttatttttcgttatgcttgctgtctttgccgtggtgttaagcttaatgttgccagaaatcaaatttgataacttaatggcgacgccaattgataaggctttaattatctctgcaagccctgtatttttcacggcgtttggtttccacggttccattccaagtttaaataaatacttagatggcaatgtaaaagcattgcgcttctctattttggtcggctctgccataacactttgcgcttatattctatggcaactatccacgcacggcttgcttacacaaaatgaatttttacaaatcttaaaagaagatgcgactttaaatggcttagtaaaagcaaccttcgccatcactggaagcaatgtgatcgcaagtgcggtaaaattattttctacattagcacttatcacttctttcttaggtgtgggattaggattgttagaatgtattgaagatttactaaaacgttcatttaacgttacagcaggcagaatttcacttggtttactgacttttattccaccacttgtttttgcattattttacccagaaggttttattttagcactaggctacgcaggtcaaatgtttgcattctacgccgtagtattgccagttagccttgtttggaaagctcgtcgtgcccacgctaatttgccatataaagtgtggggaggaaatctgactttaattatcgtattggtattaggcgtgctcattacatccattccatttgcgattcgtgcgggttatttaccctttgttgtaggttaaaaacaaactaaaaatttaccgcactttttatctaaaaaagagtaaatattgtcctaattaatttagataaaaatttcagacaaaacttatcattaatcttatacaacaaaaaggctaagttctaaaattatagaacttagcccttaaactaaatgaagttcacttcatctatattatactttcaattatcgtcttgttttcaatagtttttcagtgagttcataagctcgaagttttgctaactctttagaaagttttgcaacaagtaagtcgtgatctacatcagatccgtgagatactatattttcttctgctttacgttttgcttcgtgaatacgatctgcatctaattcactacctcgaatagcaatatctgctaatactgtcacaatatttggttgaacttctaaaaaaccaccagaaacatagataacttcttcattcccatctttaagagtaaatttaacaatcccaggcttaattgctgttagcaatggcgtatgtccgggcaaaataccaagctccccttccacaccagttacctgaatttgttttacttcaccttcaaagattttctgctctgcgcttactattgttaaattaaatgtcgccattttgttctccttcaaatgacttgaagtgattacatatttttggctttttctaacacttcatcgattgaaccaaccatatagaacgcttgttcaggaatatggtcatattcgccatctaagatacctttgaagccacggatggtgtcttttaatgtcacgtatttacctggtgaacctgtgaagacttctgcaacaaagaatggttgtgataagaaacgttcaattttacgtgcacgtgctaccactaatttatcttcttcagataattcatccataccaagaattgcgataatatctttcaattctttataacgttgtaaaataccttgtacaccacgagcaacatcataatgttcttgaccaacaacaagcgggtctaactgacgtgaagttgaatctaatggatcaactgcagggtaaatacctaaagatgcgatttgacgacttaatacaacagttgagtctaaatgtgcgaaagttgttgctggagatgggtcagttaagtcatccgcaggtacgtacaccgcttgcacagaagtgatagaacctgttttggttgaagtaatacgctcttgcagaacacccatttcttcggcaagggttggttgataacctaccgcggatggcatacgacctaataacgcagatacttccgtaccagcaagggtataacgatagatattatccacaaagaataatacatctcgaccttcatcacggaatttttcagccatagttaaaccagtcaatgcaacacgtaaacggttacctggtggctcgttcatttgaccataaaccaaagatactttatctaatacgttagaatctttcatttcatgatagaaatcattaccttcacgagtacgttcgcctacacccgcaaatacagagtaacctgaatgctcaatcgcaatattacgaatcaactccatcatatttacggttttacctacacctgcaccgccaaataaaccaactttaccaccttttgcgaatggacaaattaagtcgatcactttgataccagtttctaataattccgtactgtttgattgttcttcatagctcggtgccgaacggtggatagcccaacgctcttcttcaccaattgctccttgttcgtcaattggttcgcccaacacattcataatacgaccaagtgtttttgtgcctactggtacttgaattgggttatttgtgttttctacttttaagccacgttttaaaccatcagatgtacccaatgcaatacaacgaactactccgccacctaattgttgttgcacctcaagtgttaaacctgattcaacttttaatgcatcgtaaacttttggcactgcatcttgtggaaattcaacgtcaatcaccgcaccgatgatttgtacaatttttcctgctgacattaccgttcctcttttcttaaatcgccgccgcaccggctacgatttcattcaattcatttgtgatacttgcttgacgagctttgttgtacaccaaccgcagatcattaattaaattacctgcattatccgttgctgctttcattgctaccattcgagccgcttgttctgaagctaaattatctacaaccgcttgataaatttgggattctaaataacgaactaaaaggctatctaatagtacttttggttctggctcataaagataatcccaagtctgttgtctttcatttaaatgatcgtctttagattctggtaaaggaactaattgttgtacaacaggcttttgcgacatcgtattaacaaatttattgtatgcaatataaattgcatcaatttcaccattacgataagcatcaaacattgtatttgccacaccaattaactcttctagagcgggcgtatcgcctaaaccagaaagctgacctttgatattaaatccaaaggaacggaaaaaactaatcccttttgaacctattaagcccaaatctgtagaaatattttgttctttccaattttttatttggttaagtatggttttgaataaattaacatttaacccaccacacatcccacgatctgttgaaataaccaagataccgattttcttcacttcgcgctcaactaagaacggatgtttataaccgatacttgccttagacacatgactaataacgttacggatagtttcagaatacggacgagatgcagccatacgatcctgcgttttacgcattttcgaggttgccaccatttccattgccttagtgattttttgtgtactttgtacactggcaattttggtttttatctcttttgcacctgccatcttatctctccgttactaccaagcactattcgctttaaaaccatctaaaatactttttaacgtatctttgatttcatcattatagttaccggttttattaagctcttgcataaattcagcgtgattacggttagaataatctaaaagtgcggtctcaaaacttgcaatttttgataattccacgtcatccaaataaccaaattcaacagcaaacaatacaaccgcttgttctgcaacagataatggcgcgaattgtttttgttttaataattcagttactttttcaccgtgagaaagttgcttacgagtcgcatcatctagatctgatgcaaactgtgcaaacgctgctaattcacgatattgagctagcgcggtacgaataccacccgctaatttcttaataactttagtttgcgctgaaccaccaacacgagataccgaaatacctgggtttaccgcaggacgaatacctgagttaaacaagttagattctaagaagatctgaccatcggtaatagaaattacgttggttggaacaaacgcagatacgtcaccagcttgggtttcaataatcggaagtgcggttaaagaacctgtttttccttttacttcgcctttagtgaatttttctacataatcttcatttacacgagaagcacgttctagtaaacgagaatgtaaatagaacacatcacctggataggcttcacgacctggtggacgacgtaataataatgaaatttgacgataagctacggcttgttttgataaatcatcataaacaattaacgcatcttcgccgcgatcacggaaatattcccccatcgcacaaccagcataaggggctaaatattgtaacgctgctgattcagatgcagatgcagctaccacgatagtatttgcaagcgcaccatgttcttctaatttacgcacgacgtttgcaatagtagaagctttttgaccaatcgcaacatagatacatttaatacctgaattacgttgattaataatagcgtcaattgctaacgcagttttacccgtttgacggtcaccgatgattaactcacgctgaccacgaccaatcggtaccatggaatcgacagctttataaccagtttgaacaggttgatcaacagaacgacgatcgataacacctggcgcaatcacttctactggtgagaaaccatcattttcaatttctcctttaccatcgattggctgaccaagcgtattaactacacgacctaataaaccacgaccaactggtacttcaagaatacgacctgtacattgaacttccataccttccgctaaatctgcgtaaggtcccataactacagcaccaacagaatcgcgttcaaggttaagtgccatcgcataacgattacctggtaaggcgatcatttcaccttgcatcacatcgcttaaaccgtggatgcgaataataccatcgcttacagaaacaattgtccctgtattacgcgcttcactgaccacgtcgaattgagcgatgcgttttttaatcaattcactaatttcagttgaatttagttgcatcttgtattcctcttataattgcaactcgtttgcgagacgagtaagttgcccacggctacttccgtcaatcacaaagtcttcagtacgaacaatcacaccagcaataagtgcgttatccacgttgcaatttaatttcactttgcgagctaatcttttttccattgcagctgcaattttttcgatttgtgttgcattcaatggttgcgcagatgttacttcaacttctgcaatagcttggtgttcttctacgtgatgtttaaattcttcaaacaccgcaggaatagcactcaaacgcttattttcagccattaaccgaataagattttgcccatattgatccaattgttcgccacaaatagaaattactgtatcagctaatttctgtgcagaaagagaactacttaagtaagctttcaccgtttcatcttcagctacggcagcagcaaaacctaacatttcagtccatttttcgaccgcactttgttcaatggcaaagtcgaatgcagcttttgcataagggcgagctattgtagttaattctgacataagctaagcctcttataactctgcaactaatttatcaataatgtcattgtttgccgcttcatcaatagaacgacccacaattttctcagcaccagccacagccaatgaagccactttaagacgtaattcttcttgaacacgtttacgttctgcttctacttctgcataaccttgagcaataatttttgcttttagttcttcggcttccgccttcacttcgtctaatacttcattgcgacgtttattcgctgcatctaaaatttcttgagcttgtacttttgcagctgaaagttcttgttcaacaagatttttcgtatctgcttgctcttttttagctgcttcagctgacgctaaagcgttcgcaatttggctttgacgtgtttcaatcgcattaataattggtggccaaacaaacttcatgcaaaaccacacgaaaagtgcgaatgcgataagttgaccaatcaatgttgcatttaaattcacaacgtcctccttactatgcttgttttacgttgataagcaaataaggtgattagtttaataaaccgatgaatgggtttgcgaaaatgaaaagtaatgaaataccaacagcaatcattgcaatcgcatctaaaagaccagctacgataaacattttagtttgtaagctagatgctaattctggttggcgagctgatgattctaagaatttaccacctagaatagcaaagccaattgcagtacctaatgcagcaaatgcaagaagaattgatgcaccgatgattgtcgctgtaattacagtttccataattttctccaatagaagttaagttttagccctagagctggttaataaaaaacgattaatgatctgctttgttataagcaatacttaaataaacaaccgtcaacatcataaagatgaaagcctgcaaggtaataaccaaaatatggaaaatagcccaagcaagatgtaacggaatccctaatgctgcaatggccatattagcggaatacattacagcgataagaataaagatcaactcccctgcatacatgttaccgaacaaacggaaagcaagtgaaattggtttagccaataaagtcaccgtttcaagaataaaattaacaggaataaacgcccaatgattgaatggatgaagcgtatattctttaactaaacctttgaatcctttagattttattgtgtagaaaagaattaaaaagaaaacacaaatggacatacccaaagttgcgctaatatctgctgtcggcactgcacgaagataatgaataccgaacaaacctgcaaattgaggtaagaaatcaacaggaattaagtcgatagcattcatgatgaatacccaacagaaaattgttaatgcaagtggcgcaactacgttacgtggaccatgaaaattttctttcacgattccattaacccattccacaacaatttcaactaagcattgcatttttcctggaacgccagttgttgcttttttccctactcgagaaaaaacaaataggaaaataaccgcagcaagaatagaaaagaacaacgtatctatatgaacattccaaaatccatcccctgttttgagaaaggataaatggtggctaatgtattccgatgttgtttgtccagacataatcgatcctttgttctgaagaagaataacccaaagttaaattttattgagaataagtggaataatattattcagcactaatgccaataaaaaaccaacaaaaaacgcaataaaattgataacgaataaccatttgatggcaataatgataaaaatcatcgttaaaataaactttattgcttcagcacgataaagtgcggtcagttttgttgaaaaattttgttttctgtaaaaaatgataaatataaatgtacaaaaaggcaaaaaggcacttaaaaaaccgtagctaaaatctaccgcactttggcgttgccatccataaataaacaaataaaaaactacaagcaaaagactctcaataacaatagcttttctgtagttttttttagcgtgagataaaatgcgcgacatcacttttacaaaataattttagcccgccgattatacctttgctggctttagattcaacttaaaaacacataaaaagtgttatataaatcacacttttagaaaataatttatctatttgttactttttaacgtaaaacgattaaatgtcgttcgcctataagttcaggaacagataattcaatcactttttgaatagtatattttttattcaattcattaatttcatcttcctgataaatcccttttaatgcataaaaatatccattttcttttggtaaatgatggcaccaatctgtcatatcttttagtgaagcaaaagcacgacttaatacgccatcaaatttatcttcaggttgatattcttctactcgacttaaaacgggggttacattagttagtctaagctcacgtatagcatttcgaataaaactaatacgcttacctaagctatcaaggaggacaaattgtttggaaggattaataattgccaaaggtaaaccaggcaaaccaggccctgtaccgacatcaataaaacgatcaccttgtaaataaggacttacaacaagactatctaaaatatgtttaactaacatttcttgaggatcacgaactgacgtcaaattataagctttattccatttattgagtaaattgaccagattaatcaactgctgaatttgttgatcacttatttttatatttgcttgcgcaagtaaactgactaatttggctttcatatttattatctctttgaaaaattacgctattttacttaaaagtgcggtaaatttccttaatgtttttagtaatttgatgaattatttaccgaatcaatgtccagttttacaccataaattgaatgcacctccgcataattcatttcaaaggctttaattgcttctgttcaagaaccaaagaatgaatgttcgctaaaaaataagtttgttctgcttcaggaatggaaagtggcattaacttgagtaaatcttgatgaatagctaaaacttgtggaaaaatgaccgcactttgcatttcttcgagcatttctgaataaagcggagaaacacaacctcctcgttctattcgacctaagctgcaagcaatgtgtagcagcataaaatccacttgaggcgtattcacatcagcttgccagtaatgagctaatcgatttcgtaaacgaaatatcacatcaataatagattgatttatttgcttgcgaattttccaacgttctagttgcttaaataaccgcatttgtttttgttagttcaaaatttgttcgctaatttaccgcactttactgaaataaaacagtgcatagatcacagttttgtagcaaaatggtaaaaaaatttgtaaggatgtaaaaatgttagattacgagatcttcaatccatatgaaggattgatttttgatatggatggaactttaattgataccatgcccgtgcatgcgcaggcttggacaatggtgggaaagaaatttggctatgaatttgattttcaaattatgtataacttcggcggggcgacggttcgaactatcgcgggggaaatgatgaaagcggcgaatatgccactagatcgaattgaggatgtgctggctgcaaaacgtgagttgtcttatcaacttattccgactcaatcaaagttattgccaacctttgaaattgttaaatccttccatcagaaaaagccgattgctttaggttctggctcacaccgtaaaattattgatatgttgatggataaactggctatcgcaccttactttaatgcaattgtcagtgcagatgatgtaaaagaacataaaccacacccagaaacttttttacgttgtgcggagttaattcaagcaaatccaagtcgttgtatcgtatttgaagatgcggatttaggcgtgcaagcaggattaagtgcgggaatggatgtgtttgatgttcgcacacgagaaattatttcgccaagataatggatattttttcattttttagtgctgatttttggcagactaatagcttatgctttatgtttatcagcgcgtttttgagtgcaacagtattaccaggtaattcagaagttatatttgttgcgcttgctgtacctaaattaatgttaggttctttatttaacgcagatatattagctctaatattgattgcaaccgctggaaatagcttaggaagtttaaccacttacggaattggacgatggatgccaaaattcgatcccaaaaattaccgcactttatgggcaataaatcagctacggcgttatggggcgattgctttacttttgagctggctgcctgtagttggcgatttattttgtgccatagctggttggttaagattaaattttgtaacgagtagtctctttatctttctaggaaaaatggttcgttatgttgcgttattgtttttgagtacaccattcttattataaaatgagcaagaaaaaaccccacaataaatgtggggcaaataacctaaggaaccaattttattaaaacaactgcaagttgcttacactataagactaatactttataagaaagttcaaaattttttaaaaattttcaaaataaaaatttttgcataaaagaaaccccacaataaatgtggggcaataacctaaggaaccaattttattaaaacaactgcaagttgcttattctataagacaatgaaccttactataaagttcattaaaatttgtaaaaaataaatatttattcaattatttcttaacaaactgatttataaggaaaatttatgccattacttgatagttttaaagtggatcacacaaaaatgaacgcacctgcagtacgcattgcaaaaacgatgctcacgccaaaaggcgataatattactgtttttgatttacgtttttgtattccaaacaaagaaattctttccccaaaaggcattcatacacttgaacatttatttgctggatttatgcgcgatcacttaaatggcgatagcatagaaattattgatatttctccgatgggatgtcgcacgggattttatatgtctttgattggcacaccaaatgaacaggaagtgtctgaggcttggttagcttcaatgcaagatgttttaggtgtacaagatcaagcttctattcccgaattaaatatctatcaatgcggaagctatacggaacattccttagaagatgcacacgaaattgccaaaaatgttatcgcacgcggtataggtgtaaataaaaatgaagatttgtcactcgataattccttattaaaataggaagacgcttgattaacctaaaaaagttagtagtaaaaaacgcactttatgatctaccccaaaagttgactaaataaccaactaaggtgtagattttttatgaccaaatacaacactcttttcaaacaacaagtcatcgaatttgatcttcaaaatggtaaaaatcgttcacttacccgcaggtattttcaacttgctagcagaacattacgacattggattaaccaattaattataattaaatcaataggttatccgtacttagtaagaagcaaaattacttacctgaatttaaacttaacataatacaagcggttaaaaatgggcaattttctgcagaagccgcatattttacattttggcattaccaattcaggcgttgttagtcaatggctgcaagcctttgaaaaacaaggtataaacggcttaatcctcaaacctaaaagtcgtccaatcatgaaaccgaaataccctaagatgccacctaaaccgaaaacatgaggggaagaactagaattggaaaatttactacgtgcggagaacgcaatcctaaaaaagttgcaagaactcaaccagcaaaaaagacttgaagacgcaaaacccaattttacattccgaccaaggttggctgtatcaaatggtcggttatcaggcgattttacgagagaatagcattcaacagaatatgtcaaggaaaggaaattatttagataacaatgcgatggaaaacttctttggacgattaaaaactgaatgttattacgacaaacgatttgagacgttcaaacaactgaaaaaacaactcatgagtatattcattattacaaccatgatcacattcaggggaaactaaaagggctgagccctgtgaatgacagaactcagtccttgaactaaatcaatctaactttttgggggaagataaattccaacttgcggtcaattaatagcttgaattgattaacacttcttcgccatagccgcctaaagttggcattggttgataagtagagtttgcggcacgcattaaacgaataccacgaacacctgcttctttagctgctagtacatcatcatcgctgtcgccatagtgaatactcactttatgtgaaatgattgcaggcgttttgttatattttgttgtacgttcacggctgcccataaattcaactgggtgcatattcttaatattgaacgttttttctaaaattggtgttacaccatccactttgccagtagtacggccagtgaaaaagtaaacttggtcgccacgtgcttggtgcatattaattaaatctatggcaatttgtttaggaatagaatatttatcgcaacctgcatttacttcattccagaaatcttggtttttcaaataatcgtgtttacctggtgagaatttttgttgtccgtggtaaaagcaagggctactgaaaagcacggtatcatcaatatcaaagcttacattaattggtgctttaccttctaaactttgtttgatttgatcaacactaatccaatgaattgcttgctcttgtaacatttcacgagcattagtgccagattgagtataaggttctgttttgcctgccatcgctggaactgcagctgcagttaaaagtgcgattacagataatttcatgacgtttttcattgcctttcctcacaaacgctgatttaaaaaccgctcagatcatacatttttttagcttatattcaataattggnnnnncattccattcattaattaattaatgaatgaatgnnnnntaatcaatttgtcgccatataacgaacaacttttcactttataaaggacagaacaatgacaacgattgtaagcgtacgtcgcaatgggcaagtcgtcgtaggcggtgatggacaagtttctttaggcaataccgtaatgaaaggtaatgctcgtaaagtacgccgtttatataatggcaaagtgcttgctggttttgcgggtggaacggcagatgcatttacactttttgaattatttgaacgtaaacttgaaatgcatcaagggcatttgctaaaaagtgcggtggaattagcgaaagattggcgtacagatcgcgcacttcgtaaattagaagcgatgctaattgttgcggatgaaaaagaaagtttaatcatcacgggtattggcgatgtggttcagcccgaagaagatcaaattttagcaatcggatcgggtggtaactatgcgttatctgcggcacgtgcgttagtggaaaatactgaactttctgcacatgaaattgttgaaaaatctttaagaattgctggtgatatttgcgtgttcacaaataccaatttcactattgaagaattaccgaattaaggaaaaagctatgtctgaaatgactcctcgcgaaatagtttctgaattagatcaacatattattggtcaagccgatgcaaaacgtgctgtggcgattgcgttgcgtaaccgttggcgtcgtatgcagcttcaagaacctttgcgtcatgaagtaactccaaaaaatattttaatgattggcccaactggtgtgggtaaaactgaaattgcgcgccgtttagcaaaattagctaacgcaccatttatcaaagtggaagcaacgaaatttactgaagtaggttacgtggggaaagaggtggattccattattcgtgatttaacggatagtgcgatgaaacttgttcgccaacaagaaattgcgaagaacagagcaagagctgaagacgtggctgaagagcgtattttggatgctttacttcctccagcaaaaaatcagtggggcgaagttgaaaaccatgatagtcacagcagtactcgccaagcgttccgtaaaaaattacgtgaaggtcaattagatgataaagaaatcgaaattgatgtgtctgctggcgtatctatgggggttgaaattatggctcctccaggcatggaagaaatgacaaatcaactgcaatcattgttccaaaatttgggttcagacaaaacgaaaaaacgcaaaatgaaaattaaagatgcgttgaaaacgttgattgatgatgaagcagcgaaattaattaaccctgaagaacttaaacaaaaagccattgatgctgtggaacaaaatggtattgtctttatcgatgaaatcgacaaaatttgtaagaaaggtgaatacagtggtgctgatgtatcgcgtgaaggtgtgcaacgtgatttacttccgttagtagaaggttcgaccgttagcaccaaacacggaatggtaaaaactgatcacattttatttattgcatctggtgcattccaagttgctcgtccttcagatttaatccctgaactacaggggcgtttgccgattcgtgttgaacttaccgcattaagtgcggcggattttgagcgcattttaacagaacctcacgcctctttaaccgaacaatacaaagcgttgatggcaacagaaggcgtgaatattgaatttacaacagaggcggttaagaaaattgctgaggctgcattccgagtgaatgaaaaaacggaaaatatcggtgcacgtcgtttacatacggtaatggaacgtttgatggataaaatttctttcagcgcaagcgatatgaatggtcaaacggtcaatattgatgcggcttatgttgcggatgcacttggcgaagtggttgaaaatgaagatttgagccgttttattctttaaagataaaaattttacatataaaagtgcggtaaatttttaccgcacttttttgttttctaaattgagaaactaattagtttttaatttactccaatatttttcataaatatcaacagcttctcctacatcgccttgcataattcctttttctacttcttccgctggtggaaataattttggatcattagcaacttccgcgcttagcaatgttttcgccccattatttggcatagaaaagcccatgcgttcgataacaatttttgcattttcagggcgaagtaagaagtcaatgaacttatgtgcaccttcaacattttttgctgtagtcggaatcgcatagttatccatccagaaaattgcaccttcttttggatacacaaattgaagagattgattttctttctgcgctaaataagctgaaccattccaaatcataccaattgcaacttcgccttgtacgtaagggacttcaggagaatcagagttaaaagtcgctacatttggtaacagtttttctaaacgctcataagctgttttgatgtcttcttcattggtggtatttggcgatttaccatccagtaataatgctacgtggaacacttcacgcgcatcactggtcatgagaactttgcctttaaattcaggtttccataaatctgcccagctggtaatggttttaggatcaatctcatccgcattaacttcaataccagttaagccgtaaacgtaaggtaatgaatatttattttctgggtcgaattctttatttaataaatgtttagggatttgatgaatattggtcaatttactttgatcaatcggttgaagcatcttttccttaatcattttatttacgtagtaacttgatggaaacaccaaatcatagccagaacccgtattctgagtaagtttaagtttcgcatacatttcttcgttgctttcaaaggtagaataaattacctcgatgccagtttctttagagaactgtgcgactaaatcagaaggcacatagtctgtccagttatagacgtaaagtttgttattggcaaaagcggaagccgcaaaaagtgcggtggtggaaaggaaaagatttttgagtgagtgagcaaagaattttttcaatttattgacctccgagggttatcgttcatcataaaacacgcaaattttgcgtgcgcgcagtatagcatttttttctaaaaggtttgacatatttccctttcggggtaagattttgccagttttttcctaagggattttttatgcttaattttgcctatcaagaacacgttcgctcttattatttcgactctcgtaaccaagattttcaattcccgccgctcactcaaattgaacatgctgatgtatgtgtgatcggggctggattttttggtttatctgcagcattagaactggcggagaaaggaaaaaaagtcattgtcttagagggagcaagagtaggatttggtgcttctggtcgcagtggtgggcaggcaattaatggctttgaagaaggcattgatgaatacgttaaacaagttggcgaagataaagcacataaactttggaatatgtcattagagaccattgatattattgatgaacgtattgaaaaatatggcattcaatgcgactggaaaaaaggctatgccacattagcattaaatgaacgccgaatggatgacttaattgaaatggaaaaagaaagtcataaaaattttggctatcagaatatgcaactttgggataaaactaaattaaaacagcacttaggcagcgatatttatgtgggggggctatttgatagtaattcagggcatttgcatccacttaattattgcttaggtttagcgaaagcttgtgtcgatctgggtgttcagatttttgaacaatctcctgtcgtggatatggttgagaaaaatggttgcgttgaggttaaaacagctaaaagtgcggttatttctcaagacgttattttagccaccaatgcttatattaatgtcctcccgaaatctattcatcacggcattaatcgtaaaatattacctgtggaaagttttattatcgccacagagccgttaagccaagcggttgctgattctgtcattaataatggcatgtcggtgtgtgataacaatttattattagactattatcgtttaagtgctgacaatcgcttgctttttggtagtgattcgagctcagaaaaagatatggtcgcgattatgcggaaaaatatgttgtgtgtattcccgcaacttgaaaatgtaaaaatcgattatggctgggctggcccgattgatatgaccttaaattcaacgccacattttggtcgtatttctccgcatatttattttgctcatggttattctggtcacggtgttgctttgactggtcttgcggggcgaattgtagcggaggcgattttgggtgacgatgaacgtttatctatttttgaaggactgaaagtcccttctgtttatggtggtcgaattatcaaagatcttgcgacaaagattggtgtgcagtattacaagtttttagataaataccgttaaaatacaacaatgtttttctaaagcattgccatcaaaattgactaaaataattaaattttgtatggatataaattctaaatcagttaaaaaatttaccgcactttaaagcaagaattaaaataatatttttcgctacaatttgtgttttccattaagagagaaatatgtcagaaaatttgttacttttcagcttgttagctgttgttattatattgattttattacttattctacgccagcaaaaatatacacatcttcatcaagaattatcgaaaacgactcaagattataatcagcttgccagtaaatttgatgaacttagtagcattaaaaaccagtttgaacaacaaacaattaaagtacagactgaaaatcaagggctgcaatatcgtttaactgaacgtgatgaacaaatacatcatctcacacaagaacgacaaaatttgactgaaaaattgaccgcactttctcaagaattaacggggttacaaacaaccttaacagagaaagaaaaatatttttccacacaacaacagaactttgaacaatctaagctgcagttgagtgtggaatttcaaaacctagccaatcggattttagatgaaaaaagtcgatcatttagtcaatcaaatcaaacggcattggaaaccttgctcaagcctttccgtgagcaaattgaaggtttccaaaaacgggtcaatgaaattcactccgaatccgtgaaaggcaatgcaggcttggaagcggaaattaaaaaagtgctggaaattggtctgaatatgtcgcaagaggcgagtaatttaacttctgcactgaaaggcgaaaagaaaacgttaggcaactggggcgaagtgcaattagaacgagcgttgcaactggcaggacttgaagaaaatgtacattaccgcgctcaagcgcattttaaagatgaacaaggcggacgaaattatcctgattttgtgttgaatttacctgatgaaaaacacttaattatcgacagcaaaatgtcgttagtggcttacgaaagtgcggtgaattctgaggatgattttgaacgagagcgtttactgaaagaacatatttctgcattgaaaagtcatattaatgatctgcataaaaaagattacagcaatctgattggcatgtgcagcccgaattttgttcttatgtttattgcggtggaacctgcgtatattgaggctttaaaagctgatcctgccttatttaattacggttatgaacgcaatgtaattatggtctctcacactacgctaatgccgattttacgcaccgtggcaaacctctggcgtatcgaacgtggtaatgctgaagccaaagaaattgctgaaaaagcgggcgaaatctataaccaaatttgcttggtggcagagcgtttaaacaaactcggcaatacgctttccactgtcagcaaccaatacaatagcaccgtcaccgcacttgttggccaacaaggattagttggcaaagtagaacgatttaaaaccctttccgcaaaagccaataaaacaatgcccgatgtggacttattgaataatcagctggatttggctagattgaatgtcttaaatcaagaaaatcttcaataaattnnnnncattccattcattaattaattaatgaatgaatgnnnnntatcgatctcgcattaactgcgggtgtaccaagttttctacaaacgttgaatgtagtaacgaatgaaatgtatgttgaacgcgttgttattgcagaagaaattaaagaaaaaaatccagaaatattgaccgcacttttaacacaacttcaacaacttgaaagccatcagggtaatcaaatacaagtggaatttgtatcacacgaaacttttaaaaaattcaccctcgaaagtaaagctattgttcgtactggcgaatgttcaccttatgccaatgtgattttatattctggcgtgctattttaatcagggtgaaattatggaaactttactcaaaattagtggtgttgataagtcatttccaggtgtgaaagccttgaataatgcctgtttatctgtttacgctggacgcgtaatggcattgatgggggaaaatggggcgggtaaatcgactttgatgaaggtgcttactggtatttattctaaagacgcaggcacaattgagtatcttaatcgatcagttaatttcaatggacctaaagcctcacaggaagctggcattagtattattcaccaagaactgaatttggtcggtaatctcacgattgcagaaaacattttccttggtcgtgaatttaaaacctcgtggggagcgattaactggcagaaaatgcaccaagaagcagacaagctacttgcgcgtttgggggtaactcacagcagtaaacagctttgcgctgaactttctattggtgagcaacaaatggtggagatagccaaagccttaagttttgaatccaaagttatcattatggatgaaccaaccgatgcgctcacagatacggaaaccgaagccctattcaatgtgattcgtgaactcaaagcagaaaatcgtggcattgtttatatctctcatcgtttaaaagaaattttccaaatttgtgatgatgtgacggttttacgcgatggtcaatttatcggtgaacgcgttgtggcagagattacagaagatgatttaattgaaatgatggttggtcgtcgtcttgatgaacaatatccgcatttatcacaagaaaaaggcgaatgtgtattggatgtgaaacatgtgagcggaagtggcattgatgatgtttccttcaaattgcatgccggtgaaattgttggtatctcgggcttaatgggtgcgggtagaacggaactcggcaagctactttacggtgctttgccaaaaacggcgggaaaagtgcggttaaaaaatcaagagattgagaatctcagtccgcaagatggtttggataatggtattgtatatatttctgaagatcgtaaaggtgatggcttggttttaggaatgtcagtaaaagaaaatatgtcgctcacatcgctcgatcatttttcacaaaaaggcggtattcgtcatcaagcggaaaaaatggcagtagatgactttattctgatgtttaacattaaaacacctaatcgtgatcaacaagtaggtttgctatctggtggaaatcaacaaaaagtggcaattgctcgtggattaatgactcgcccaaatgtgttgattttagatgaaccaactcgtggcgtagatgttggcgcgaagaaagaaatttatcagttgattaacgaatttaagaaagagggcttgagtattttaatgatctcatctgatatgccagaagtgcttggtatgagtgaccgcattttggttatgcgagaaggcagaatcagtgcagaattttctcgcaaagaggcaactcaagaaaaattattagcagcagctattggtaaataagagtaggtaagtatgatgaaaaatgaaacatctaattttcaaataggaagatttttgattgaacagcgttcttttattgcgttgattattcttatcgcgattgtatcaatggttaatcctgatttttttagcgtagataatattttgaatattttacgccaaacttcggttaatgcgattattgcagtgggtatgactttcgttattttaattgctggtatagatctttctgttggatctgtattggcattgacaggtgcaatcgccgcttcaatggtgagtatcgaattgcctatttttttagtcattcctgtggttttattgattggaacacttcttggtggcataagtggtgtaattgtggcaaagggaaaagttcaggcttttattgctaccttggttaccatgaccttactgcgtggtataacaatggtttatacagatggtcgtcctattacgacaggtttttcggataatgctgatctatttgctagcattggtacaggctatgttttaggtatcccagtaccaatttggattatgagtatcgtgtttgcggttgcttggtatattttaaaacacacaccaatcggtcgctatatttatgctttaggtggaaatgaggcagcgacccaactttctggtattaacgtcaataaaatcaaagtatttgtttttgcggtgagtggatttctttctgcgctggcgggtttaattgtaacttcacgtttatcttctgctcaacccactgctggcgtatcttatgaattagatgcaattgccgcagtggtagtcggtggaaccagtttgatgggggggaaaggtcgtgtaatgggaacgctcatcggtgcattaatcatcggatttttaaacaatgcattaaatttattagatatttcatcttactatcaaatgatagcaaaagcgttggttattttggttgctgttttagccgataactatcttggtacaaaaaaactgtaactcactttaaggaaaaactatgaaaaaactaaccgcacttacttctgctgtattattaggtttggctgtttctggctctgcttctgcacaagacacaatcgctttggcagtatctacattagataacccattttttgtaacgttaaaagatggcgcacagaaaaaagcggatgaattaggttataagttagtcgtgcttgattcacaaaatgaccctgctaaagaattagctaatgtcgaagatttaactgtgcgtggtgcaaaaatattattgatcaatccaactgattctgaagcagttggcaacgcagtggcgattgcaaaccgtaagcatattccagtaattacattagatcgtggcgcagctaaaggaaacgtagtgagccatattgcatctgacaatatcgcaggtggtaaaatggcaggtgattttatcgcacagaaattaggcgataatgccaaggtgattcaacttgaaggtattgcaggaacatctgcggcacgcgaacgaggtgagggtttcaaacaagctattgatgctcataaattcaatgtgcttgccagtcagccagcagattttgatcgaacaaaaggtttgaatgtaacggaaaatttgttggcatctaaaggtgatgttcaagcaatttttgcgcaaaatgatgaaatggcattaggtgcattacgtgcggtgaaagccgcaaataaaaaagtccttatcgtaggttttgatggtaccgatgatggtgttaaagctgtaaaaagtggcaaaatggcggcaactatcgcacaacaacccgagcttattggttcattaggtgttgttaccgctgataaaatcttaaagggcgaaaaagttgaagcgaaaattccagtagatttgaaagtaataagtgaataatctatctactaaataagctcgttatatcacattatggggcaaattatatttgtcccattgtgtagaaagaaaaaatataacaatacaggataaaataatgagaaaaaccctcacaattctcggtagtatcaatgctgatcacgttatttctgtgccttactttgctaaacccggtgaaacgctaacaggtcaaaattatcaaattgcctatggtggcaaaggtgccaatcaagcagtggcagccgctcgtttaggggcaaaggtcgcgttcattagttgcattggatcagatagcataggcaaaacaatgaaaaatgcgtttgcacaagaaggaattgatacaacccatattaataccgtttcacaggaaatgacgggaatggcatttattcaagttgcccaatcgggcgagaacagtattgtgctggctagcggtgcaaattcacatttgaatgagatagttgttcgtcaaagtgaggcgcaaattgcacaatcggattgcttgttaatgcaattagaaaccccactttctggtgtggagctggctgctcaaatcgctaagaaaaatggtgtcaaggttgtgctaaatcctgctccagcgcagattttatcggacgaattattgagtttgattgatattattacaccaaatgaaactgaagctgaaatcctgacggggatagcggtaaccgacgagcaaagtgcggtgaaagctgcgagtgtttttcacgataaaggtattgaaaccgtgatgattacccttggcgcgaaaggcgtgtttgtcagtcgaaaaggtaaaagccgcatcattaagggcttttgtgtgcaagcaatagatactaccgcagctggtgatacatttaatggcggttttgttacggctttattggaagaaaaatcctttgatgaagccattcgttttgggcaagctgctgctgcgattagtgtgacgaaaaaaggggcgcaatcctctattccaacgcgtcaagaaactttgaaatttcttgaacacgcttaaagtgcggtaaatttttgaggtgtttttatggcgacaatgaaagatattgcacgactggcgcaagtttcgacttccacagtttcacatgtcattaatggatcgcgttttgttagcgatgaaattcgtgagaaagtgatgcgtattgtcgctgaactgaattacaccccctcagctgttgcacgaagtcttaaggtgcgagaaaccaaaactatcgggctacttgtcaccgcaacaaataatccattctttgcagaagtgatggctggcgtggagcaatattgtcagcagcatcaatataatcttattattgctgccactggtggcgatgccaaacgcctacaacaaaatctgcaaactctaatgcacaaacaagtggatggtttgcttttgatgtgtggtgatagccgttttcaggctgatatagagttagccatttcgctgccactcgttgtgatggactggtggtttactgaattaaatgcagataaaatactcgaaaattcagcacttggtggctatttggcgacaaaagcattaatcgatgcaggacatcgtaaaattggcattattacgggaaatctcaaaaaatctgtcgcacaaaatcgtttgcaaggttataaaaatgcgctgttggaagcaaaaattgcgttaaatcctcattggattgtcgaaagtcattttgactttgaaggcggtgcccttggtatacaatctttacttactcaatcttcacgtccaacagcagttttttgttgtagtgacaccattgctgttggtgcataccaagctattcagcaacaaggcttacgtattccgcaagatctttcaattatgggctatgatgacattgaattggctcgttatctctcacctcccctttccaccatttgccaaccgaaagctgaacttggcaaacttgctgtagaagcactattgcaacgaattaaaaatcctaatgaaaattacctcactttggtgttagaaccgacttgtgtgttaagagagtctatttacagtttcaaataaaattagaataactcaatttccttattgctattttcaaaaaaactgctattttcttgcggtttttttgtttatttaacccactgtttaatttaggaataaaatcttatgaaagaaaacaaacctgttgatccttatgcgaaatataacgaacaatcgaatattatcgcgaaaataatttttgctagtcgctggttgcaagtgccgatttatttgggcttgattgtcacccttgcaatctactcttataaatttatcaaaggattatgggagttagtgattaatgtaaatgatatggattccaacacaattatgttaggcgtgttgaatttgattgatgtcgtgatgatcgctaacttgcttgtgatggtgactatcggtggctatgaaatttttgtatccaaattgcgtacacgtaatcaccctgatcaacctgaatggatgagccacgtaaatgcgactgtgctgaaagttaaactttctatgtctattatcggcatttcatctatccatatgttgcaaacttttgtgaatgcaagcaatatgccagaaaaaacgatgatgtggcaattattgttgcacttgggctttttagtgtcggcaattgctttagcttatacggacaaaattttgtatagcacaagccataaaacgcattaaaaatttaccgcacttttaaccccgttcaaattgaacggggttttatatatcatatagttacaatttaattttttagtataatacgccgtttagaataggaaagcttaaataaaatactaagatgttaatcaagtagaaattaatcttctaaatctagaggctcttgcgaaagtataattcctgtcagatctgcgtaaatataatcttctgggaaaaaggttacgccaccaaaattcactggaatatcactctcgccagcactgctttcatctgcactgactggaattggcgcaagggcatgaataccaatatcgaggttttctaattgctgaatttggcgtactgcaccatatacaataatgccttcccaaccattatcaacggcaagttgagccaattctgcatcaatcaaaccacggcgtaccgcaccaccgccatcaatgacaagcactcgaccttcgccgttttcttctaatacttcagcaattaatccattactttcaaagcattttactgtagtgactttaccgtaaaaatgacttacgccaccaaagcttgaaaaaattggctccacgacatccacttgttctgcataaagatcgcaaagttctgaagtatcaataaacataactttcccctatcgattgttgaaatcttgtttgctttagtatatgccgatttagccgataagcaagcctaaactaaacaagatattgattaataacgaaatcatagacatttgagccaacattggacgcaattcacttggctgctgactgtgataaacaaagatcgcgtgtttagctaacaacggcattgctaatacaaataaataatttgtccaagaaatagccgttaccaccgcaaatgctaaataacatagggtcgccacacttaataaaatacaatgataaacacgccctttatatgcacctaaacgaacggctagggtatttttgccagctttcgcatcctgttcaatatcgcgtaaattattgatatttaataccgcacttgccaataagccagaaccaatagcaggcaaaataatgtggctatcaatactgtgagtttgcaaataataagtaccgccaacaccaagcaaaccaaaaaataccaacacagaaatatcgcccaagcccatataaccataaggttttaccccaactgtgtaagtaatggcagcaacaatagctaaaattccaagcccagcgaaagcgaataaatctgagagattttcataagcgattccaatcaagaaacttcctgaaagaaaacttgccatcactattagaattaatccccatttcagttcttttgctgaaattgcacctttttgaatgccacgtaatggcccaatacgttcttcagtatctgaacctttttgatgatccccataatcattggcaaaattagaaagcacctgcaataaaattgtcgtgagtaaacaaagcaccattacaagcccattaaaaccttgtggattcgcccaataacctaatgccgaacccgtgaaaatcgatgccaacgctaagggcaaagttttcggtcgagccgtttcccaccacattttcaatttttcatttgtcattttttttgaccgcacttttgattacaataagccgcgtattctacactaagacacccaatttatgaatgatttaaccttatcgcctatcgccattatccacacgccttataaagaaaaattctccgtaccacgccaacctaatttagttgaagacggagtaggcattgtagaactcttaccgccttataattcgcctgaagccgtgagaggattagaacaattcagtcatctttggttaatttttcagttcgaccaaatccaacaaggaaaatggcaacccaccgtacgccctccacggttaggcggtaatcaacgcgttggtgtatttgcttcacgtgcaacgcaccgcccaaatcctctcggtttatccaaagtcgaattacgtcaagtagaatgcatcaacagtaacatttttctccatttaggtgcggtggatttagtggatggcacgcccattttcgatatcaaaccctatattgcctatgcggatagtgagccaaatgcgcaatcgagctttgcccaagaaaaaccaccagtaaaactgactgttgaatttaccgagcaagtcaaaagtgcggtaaaaaaacgagaagaaaaacgaccgcacttaagtcgttttattcgccaagtgctagagcaagatcctcgcccagcctatcaacaaggtaaaccgagtgatcgtatttatggtatgagtttgtatgaatttaatgtgaaatggcgaattaaagcgggtacggtaaattgtgtagaagtgattgaaatagaaaaagacaaatagatgtaatatgtaaataaggcagggaatccctgccttagttaatttaaatgtcttattttaggaaaaattgccctttagctaatttaataactgtcattagaactaataagccaatcattaaatttgagaaaacaaaggcaaaaatagacacaccttgtaaaacattgccatgatagaaagcggtagcactgtttgccatagacgctaatccgaatgagaatccccataagccaatgttaagtcctttttccacaatccaagggaataatcgcaataagaaaaataattgcaaaaatccatatccccaaaggattttagctaacgtatccacctcgccgtgattgatcgataaataagcagatacacacacaaacgcaggtgctaaaacaatccccattgtggctctaaatggtggctcaagagatgaaatacgtaaatgttgtaataatacaggttcaaaaataatccaagcaatcattcctgcgccaaagaataagtaggctaaatcatgatagccaagtaatgctaatgaacttgcacttgtgaaatttgcagcaaccgcaggcaaataaaacgaaggatgagtagatttttgctcaaatacaccaccttgccataattcactgacacgtaatgttgagaaaagtaattgaccaatcgttccaatccaaattaaaacttcagcaattaaaggattccaacgataaagaatatcgcctaccaacatagttgtaataggaatcaatgcaataaaggaaaaacgaactgggctatgatactctgcacgaacttcctcaaagtaataacgaagtttatacgcacacattaaaataaataaaatccagaccgcacttgctacaatgccaagaacatcacttaccattcgcgcagcaggaaataagttttctaaatgaaaccaagctaaagataaggctgccaaaccaagaggaataccgaaatatcctgttggaagaggaaaaggctttgttgtattcatagtatgatccttattttgaaaaatatgagcaaagtgtaacataactatcaacaacagacttttctaaaagtctcaaatttttgtgaaatttctatagagaaacatacttgttgttctggcataaaacctctacccattttcataaaaataaaaaacccgaactttcattcgggttttctcatacagggaattaattattccgcatcatctgccatgttaagcatttcagctaagttcgcactagcatcatctgcagtcatgacaaactcatcagcgatagcggcttcatcttcttcagataatttcgctacgacatcatcaactaaacgatgtttgtgacgattttgatgatacgcaaaacctgtacctgctgggattaaacgacctacgattacgttctctttcaagccacgtaattcatcacgtttacctgccactgccgcttcggtaagaacacgcgtggtttcttggaacgatgctgcggagataaaggattcagtcgcaagagacgctttggtgatacccaataattcacgttcaaattcaactggtggtttaccttctgcttcacgttggcgattaacaattttcacgcgagccacttcgacttgttctccctcaaggaattctgagtcgtaagctttagtaattaccgctttacgtaacatttggcgaacaattacttcgatatgtttatcgttgatttttaccccttgtaagcggtaaacatcttgcacttcgttcacgatgtattcagttactgcacgcacgccacgtaaacgtaaaatgtcgtgtggtgtttcagcaccatcagaaattacgtcgccacgttgtaccatttcgccttcaaatacgttgagctgacgccattttggaatcatttcttcgtaagtttcgccttctgcaggagtaattaataaacggcgtttacctttggtttctttaccgaaagacacgataccagaaatttcagctaagatagcgggttcttttggtttacgtgcttcaaataaatccgcaacacgtggtagaccaccagtaatatctttagtacccacagattcttgcggaatacgtgctaatggttcccctactttcactgctgcgccatcgtctaaacttacaattgctttacccggtaagaagtactgtgcaagaacatcagtttcaggtaagaaaatatcgttgccatttgcatcaaccaatttaatagttggacgtaaatctttacccgcagttgcacgttcacccacatcttgaaccacgattgatgataaacctgttaattcatctgtttgacgcgtcacagttaaaccatcaataatgtctacaaatttcacaaaaccagatacttcagagacaactggcattgtatgtggatcccaatttgcgatagtttcgcctgcagtgacttcttgaccgtcacctttgcttaataccgcaccgtaaggcactttataatgttctttagtacgaccaaatgcatcggtaatagttaattcagtattacgagacgttaatactaatttaccttcatcgttagtaacgaattttgcattcattaaatgcactgtaccagtgtttttaacttgcacactagattctttcgctgccgcagatgccgcaccaccaatatggaacgtacgcattgttagctgtgtacccggctcaccgatagattgagcggcaataacgcccaccgcttcgccttggttgattaaatgaccacgcgcaagatcacgtccataacatttcgcacatacaccaaaatcagtatcacaagttacaacagaacgtacttttacgctatctacagagtttgcatccaacacatcacagagtttttcatctaataaagtgttacgtggaattaatacttcttctgtacccggttttaaaatatcttctgcagcaacacgacctaacactaattcacgaagtggaactttttcatctcccccttcgattaatggggtcatgactaagccttcgtgcgtaccacagtcatcttctacaatcactaagtcttgtgccacatcaactaaacgacgagttaagtaacctgagttcgctgtttttaatgcggtatccgccaaacctttacgagcaccgtgggttgaaataaagtactgtaatacgttcaaaccttcacggaagtttgctgtaattggggtttcaatgatcgagccatctggacgagccatcaaaccacgcatacctgctaactgacgaatctgagctgcagaaccacgcgcaccagaatcagccatcataaagatactgttaaaggacgcttgtttttcaggattaccttcacgattgatgacttcttcttgagataagttttccatcatcgctttcgctacgcgctcattcgcggcagcccaaatatcgattactttattatagcgttcgcctgccgtcacaagacctgattggaattgttcttggatctcagctacttcttcttccgctgcagaaataatttcgtatttcttcgctggaatttccatatcatcaataccaactgatgaaccagaacgtgccgcatacgcaaaaccggtatacataatttggtcagcaaacattaccgcttcttttaaacctaaacgacgatatgcttcgttaatcagtttagaaatggcttttttacctaatgtttggttgaacaatgaataaggcatgcctttcggcgcgatcatccataagattgcacgaccgatagttgtatcagtcagcgtggttttcgcatcaaattcgcccgcttcatttttcacatattcagtaatacgcactttcacgcgagaatgtaattccgcttcgcctgtacgatatgctttttcagcttcgcgaggatcttgcaataacatactttcgcctttaccgttcactttttcgcgggtcatatagtaaagacctaataccacgtcttgtgatggaacgataatcggatcaccgtttgctggagaaagcacgttattggtggacatcatcaacgcacgagcttccaattgtgcttcaagggttaatggaacgtgtaccgccatttggtcaccatcgaagtctgcgttgaacgccgcacaaacaagtgggtgtaattgaatcgctttaccttcgattaagatcggttcaaacgcttggatacccaaacggtgaagtgttggcgcacggttcaatagaattgggtgttcacgaataacttctgcaagaatatcccaaacgatcgcatcttcacgctcaaccattttcttagccgctttgattgtcgtagcataaccacggctttctaatttcgcatagataaacggacggaataattccaatgccattttcttcggtaaaccacattggtgtaagtgcaagtatgggccaacagtgattacagaacgaccagagtaatcaacacgtttacctaataaattttgacggaaacgaccttgtttacctttgatcatatccgctaatgattttaatggacggcggttagaacccgtaattgcacgaccgcgacgaccattatctaataaggcatcaacagattcttgtaacatacgtttttcgttgcgcacaataatatctggcgcaattaaatctaataaacgttttaaacgattgttacggttgattacacgacgatataaatcgttcagatctgaagtcgcaaaacgaccaccatcaagtggcactaatgggcgtaaatctggtggaagaactggcaataccgtcatcaccatccattctggtttattaccagattgaacaaatgcttctaataattttaagcgtttagtgatttttttacgtttagtttcagagttagtttcttgtaattcttcacgtaatttttcacattcagcttcaagatccataccttttaagagatcttgaatcgcttcggcgcccattttcgcttcaaattcatcttgccaacgatcttcagcgtcaaggtattgttcttctgttaataattgaccgcgctctaagtccgtcatacctggttcggtcacgatgtacatttcaaaataaagtacacgttcgatatcgcgcaatggcatatctaaaagtaaaccgatacgagacggcaatgattttaagaaccaaatatgtgcaactggcgatgcaagttcaatatgacccatacgttcacgacgaactttagtttgagtgacttcaacaccacatttttcacaaatcacaccacggtgttttaaacgtttatatttaccacataaacattcgtaatcttttactggcccgaagatacgcgcacagaaaagaccatcacgttcaggtttgaacgtacggtagttaatggtttcaggtttcttcacttcaccaaatgaccaagaacggatcatatctggggaagctaacccaattttaatcacatcaaaatcttcactggtttttgattgtgcttttaaaaacttaactaagtctttcacaaatgttctcctgtcggagttaaaggtttaaagtgcggttaaaaatttcggagaattttgaccgcacttcggcgatttattgtttcgtcattttttctcttcgcttcccctgtttacggggggagctgccgcaggctgaggggggaattgcccccttccgcccttcgggcaccttcccccgcaagcaggggaaggcaagaatgaaattactcttcgtctaactcgatatttaaaccaagtgagcggatttctttcataattacgttgaaagattccggtgtgcctggctccatatgttggttgccacttacgatatttttatacatcttcgtacgaccattcacatcatcggatttcacagttagcatttcttgtaaggtgtaggctgcaccatatgcttcaagtgcccatacctccatctcaccgaaacgctgaccaccaaattgtgctttaccacccaatggctgttgtgtaacaaggctataagaacctgttgaacgagcgtgcattttatcatcaactaagtggttcaatttgagcatatacatataacccacggttactggacgttcaaatttctcgccagtacgaccatcgtaaagggttatttgacctgaagttggtaatccaccaagttttaatagttctttgatttccgcttcgtctgcaccatcgaacactggcgttgcaactggtaagcctttacgtaaatttcccgctaaacgcaatacttcttcatcagtaaaagtgcttaaatccactttttgtgaaccattacctaataaatcgtatgctttttggacatagctacgtaatttttccacttcttgtttttgtttaagcattgcattgatttgatcaccaataccttttgccgctaaacctaagtgagtttcaaggatctgaccgatgttcatacgagacggtacgcccagtgggtttaatacgatttcaactggctgaccattttcatcgtatggcatatcttcaactgggttaattttcgagataacacctttgttaccgtgacgacccgccattttatcccccggctggatttgacgtttcactgcaaggtaaactttcacaacttttaatacgcccggtgcaagatcatcgcctttaatgattttcttacgtttcacttcaagtttatgttcaaactctttacgaagttcttcgtattgctcagcaagctgttctaattggttttgtttttcttcatctgcaatggtttgttctaaccatttagtacgctctactttatctaattgcgccgcatccgcaccactagaaataagaagattacgcacacgagcaaataaaccagcttctaaaatctctaactcttcagttaaatcttttttcgcctcacgaagttgcatttcttcgatttctaatgcacgtttatctttttctacgccgtcacgagtgaagacttgaacatcaataaccgtacctgatgtaccatttggcacgcgtaatgaagaatctttcacatcggaagctttttccccaaagattgcacgtaacaatttttcttctggggttaattgagtttctcctttaggggttactttaccgactaagatgtcgccacctttaacctcagcaccaacataaacgataccagattcatcaagtttgcttaacgctgattcacctacgtttggaatatccgcagtaatttcttctgcacctaacttagtatcacgcgcaacacaagataattcttgaatatggatggtagtgaaacggtcttgttgaacaacacgttcagaaactaacattgagtcttcgaagttatagccgttccaaggcatgaacgctacgcgaatattttgacctaatgcaagttcccctaaatcagttgaaggaccatctgctaatacttcgccacgattaattggatcgcctaaattcacacaaggaatttggttaatacaagtattttggttagagcgggtgtatttaattaaattataaatatcaataccagcttcacctgcaatagtctcatcttcatttactttaatcacaatacgagacgcatcaacgtactgaacggtaccaccacgttttgcaacaaccgcaacacctgagtcaagtgcgattggtttttccatacctgtaccaactaatggtttatccgcacgtaatgttggaactgcttgacgctgcatgttcgcccccatcaacgcacggttcgcatcgtcatgctcaaggaatggaattaatgcagccgcaacagataccacctgttgtgtcgaaacatccatatagtgaatatcttcaggtttatataaaccagattcaccacgttcaccacgagcagtaacgaaagcatcagtaaaacggttattttcgtctaagtttgagtttgcctgtgcaatgatgtagtttgcttcatcaattacagataagtattcaatttcttcagtaacttgaccatcaaccactttacgatatggtgtttctaagaaaccataatcattagtacgtgcaaaagcagaaagtgagttgatcaaaccaatgtttggaccttcaggggtttcaatcggacataaacgaccatagtgagtattatgtacgtcacgcacttcaaagcctgcacgctcacgcgttaaaccgcctggacctaatgcagaaatacgacgtttgtgtgtcacttctgacaatgggttgttttgatccataaattgcgaaagctgtgaagaaccaaagaattcttttactgctgcagaaattggttttggattaattaagtcttgtggcgtgatcgcatctaaatcgcctaaagatagacgttctttgaccgctctttcaacacgcactaaaccgatacggaattggttttcagccatttcgcccacgctacgtatacgacggttacccaaatggtcaatatcgtctacttcgccacgaccattacggatgtcgatcaatttacgcattaccgcaataatatcttcattgcttaaaatacccgcaccttccccttctggaaaagctaaagaacggttgaacttcatacgacctactgtagataaatcataacgttctgcagagaagaataaattattgaataacgcttctgaagattctggtgttggtggctcgcccgggcgcatcatacgataaatttcgtaaagcgcactagttttgtcataagttggatcgacacgtagcgtttcagaaatatatggaccataatctaaatcattagtaaataaagtttcgatcgtggtgtaaccagcttgtgctaattttgcgagggtttctaacgaaatttcgccatttgcaggacaaataatttcgccagactctaaatcaacataatctttcgacgcaactttacctaaaatatattcagaaggtacaaccacttgtgagatattatctttttctaatgctttaatgtgacgagcagtgatgcgacgaccacgttcaacatacactttgccatttgcttcaatatcaaaagaagccgtttcaccacgtaaacgttctggcactaaagtcattaacaatttatcgccagcgatttcaaaggtaattttatcaaagaataagtttaagatttcttcagtggtgtagcctaatgcacgaagaatgattgttgccggtaatttacggcgacggtcaatgcgcgcaaataagttatcttttggatcgaattcaaaatctaaccaagaaccacggtaaggaataatgcgtgcgttataaagcactttacctgaagaatgggttttacctttgtcagaatcgaagaatacacctggactacggtgtaattgtgaaacgataacacgctcggtaccattaattacaaaagtaccgttatctgtcattaatgggatttcccccatataaacttcattttctttaatatctttaactgcgcgtgaagaagattctttatcgtagctcactaaacgtaattttacacgtaagcctgctgcataagttgaaccacgaatttggcactcacgtacatcaaactctggctcttctaaacgataatctacatattgtaattctgtatagccattattgcttacaataggaaatacagaacgaaatgccgcttctaaaccttgctgaccttcaggatctttttgaataaatttatcaaaagaatccaactgaatggttaataaataaggaacatttaaaacttgcggacgtttaccgaaatctttacgaattcgttttttttcagaataggagtaacccattggttttcctctgctaactgttcagtgacctagccacaaactaactgtgacgtgaatgaccgttaaaatgaccgcactctgaaccttacttctatagtggggtgacaactcaaattacatagaacgacaacttgagcaaaacaacgacaaataacggtgaatttgtcattgcgtggatgtgctttctatcaaaaacacggttaaattaagcaataaaaggtcaaaattgattaaaaatcaatctaaacctttgctaattttaaggcggtaaattttaaatgaatgcagctttctcgtcaagtttaaaacttatatagaaattttatgaaataaaaaaccgcactttcaaaaagtgcggtttaaaatctatcaattctttaaattataaagaagcttgatcaacagcaacacctgcacccatagtggtagagatgcttactttcttgatgaaaatacctttagcagtagttggttttgctttatttaaagcagccaataatgcttgaagattttcttttaattgaacttcagagaagtttgctttaccgatagtggtgtggataataccgtttttatcattacgataacggatctgaccagatttagcatttttaactgcttcagcaacgtttggtgttacagtaccaactttagggtttggcattaaaccacgtgggcctaatacttgacctaattgaccaacaacacgcattgcatcaggagaagcgataacaacatcaaagttcatttcgccttttttgatttgctctgctaaatcttccatacccactaaatcagcaccagcttctttagctgcatctgcgttagcaccttgagtgaacacagctacacgtacttcacgaccagtaccgtgtggtaatactgttgcaccacgaacgttttggtcagatttacgaggatcgatacctaagtttactgcaacatcaacactttctacgaatttagctgttgcgaattgttttaataccgcgatcgcttcgttaatttcgtatgctttagtagaatctacgccagctttgattgctttcatttttttagtcaatttagccatcgtattattcctccaccactaagcccattgaacgagcagtaccagcgattgatttcattttggtttcgatagtcgcaccagtcatatctgctgctttagtttcagcgatttgacgaacttgatctaaagttactttacccactttatctttgttcggtttaccagaaccagatttgatacctgcagcttttttcaataatactgctgctggtggagttttagtgacgaaagtaaatgaacggtctgcatatacagtgataacaactggaattggtaaacctttttctaagctctcagtacgagcgttgaatgctttacagaattccataatgttcacaccttgctgacctaatgcaggaccaactggtggtgatgggttagccataccagctgcaacttgcaacttaacataggcttggactttttttgccattttagttttcctctaattgggtaataacgctattaaatagctccccgataatttttagtgcaaaattcattgcaccacacaaaaatatgagccgcgaacggctcataatgggcgcggattatataaaaagtgcggttgtttttcaagcacttcttaaatccactataagaaattactgtgcatcaccaattaatactgaatctaacgcaatttcaatcatatcattgaatgttaattgacgttcttctgccgtggtttgttcgtgagtacgaatatgatcagacacggtacaaatcgttaatgctttcgcaccatattctgcagccaccccataaataccagcagcttccatttccacgcctaaaatgccgtatttttccatcacgtcgaacatttctacatcgggtgtatagaataaatccgccgagaataaattacctacacgaacggctttgccttttgcttttgcagcttgtgccatatcgaagtcagcaatagctgcaaagtcgttatctttgaaacgaatacggtttacttttgaatcagtacatgcacctaaaccgataatcacatcgcgcactttcacgtccatacgaacagtgccacaagaacctacacggataatttttttcacgccatattcagtgattaattctttcgcgtaaatagagcaagatggaatccccattccgtgtcccataatagaaattttacgacctttataagttccagtaaaaccaagcatattacgaacattcgtcacttcaacaacatcttgtaaaaaagtttctgcaatgtattttgcacgaagtggatcgccaggcattaaaacaacatcagcaaatgcaccttcaggcgcgttaatatgtggagtcataatttttccttatttttaataatgaataaaaatgaataaagtgcggtcattttttaccgcactttttaattgattaagataaattaaagtgctgcagcacctaagccgataaataaacccgcaatagttgcactcattaaattagcgagagtaccagcgataacggctttgatacctaaacgagcaacatcactacgacggcttggtgccataccacctaaaccaccaattaagattgcaattgagctgaagttagcaaaaccacaaagcgcgaaagtaatttttttcagttaatacaattgcagaatctggttgtaaatattttgcaaattcaagataacccacaaattcattaaccgctaatttcatcccgatcatttgtcctgcaatacctgcttcagcaccatctgttacaccgattaagtatgctaatggtttgaaaattaaaccaaagatagattgtaaggttaagtcgccatagccaaaccatccgcctacgccacttaaaataccgttaattaatgcaattaaaccaacaaatgcgattaacattgcacctacgtttaacgcaagttgcatacctgcactcgcaccgcccgccattgcttcaagtacgttagttggtttttctgaatcattgtcttctggttgtttatctgtgaattgttcggtttgtgggaacattaatttcgcaaataataaacctgctggtgccgccataaatgacgcagcgattaagtatgtcaatggcacgcccattccagcataacctgccattactgaacccgcgatagacgctgtaccacccaccataatggcaaataattcagattgggtcatatttttaatgtaagggcgaacaaccaatggtgcttcagtttgaccgacgaagatattcgccgccgctgacattgattccgcttttgacgtacccaatgctttttgtaatgcgccacctaatactttaatcacgacttgcataatgccgagatagtaaagcacagaaattaagccagagaagaacacgataatcggtaatactttcactgcaaaaatgaaaccggatggtttacttggatccgctaatccgccgaaaacgaaattaatcccgtcattaccataggcaataacattggataccatatccgcagcggcacccaacgcttgtttacctgctggcacatataaaataagggcggcaaatcctacttggattgctaacgcccctactacggttcgaatactaatcgctttacgattattagaaagtaacacggcaatagcgattaatacgaccattcccaaaatgctgcttaacacactcatttgattcccctagattagttaagttaataaaattcggcttattctacttgttttcttatgaaaagtcggcgaattttcaccgcactttttgtaaacgtctataaaatagtcaaaatcttgttaattccacattgacgtgcataagcagatagcgcattagtttcttccacactggggatatacgctgataacccagcttcatcacgtacgcctttgctatgcacgcagataatttttaatgccacgtctggataatttcgtagtagttgagcaactttgcccaccaaatgttccgcatcaaaaaaatgctttaaaaaaaccaaccgcacttcttccactttatttaatggcaacaaggcagctaaattttgcaaattccgctccagtttatcgttttttatatgtaaacgttttggtatcacttgctgtggtacaatgccagcttgatttttccgatcaaaacaaagtgtttgcaagccaatgccctcgcctttgagatcaaataaaaatttgtcagtgacatcaattaacgaacgaatacgatcaaactcaaaaaagccactactatccaaatagcaagtcaatccttgcgaacgtaaagccttaaagagtggcacaagttttttgtgatgaatagtgggttctccaccagaaaccgttacaccgcgaataaatggaactgcctccataacctgttcatacaaatactgcaaactgaccaatttcgcattttccgtataacgaggaatagtttcaggattatggcaatacaagcaatttaacttgcaaccttgcagaaaaatgcttgaacgattgccttgcccctctacatttgaaaacggaataatccgatgtaacggcacaaaaatctcagaaagagcggtcatttttctaattatttttcagcgatcacatctttttcatcgcgtaattggcgatcaaacacattggcacattcatccgtacccgagccataccaagttgtatcgcgtaatgcgacttcgcctttacggtatttttcaacttcacttttcttcactagataacctgtaacacgaattaaatccgtgtttttcaaataggtggtaatgtagcgatagcctaaggaaaatgcaccatcaataatatccaccactgcatcacagtgatctacataggtttgatcaaaagcaaataaatcccctgtaccagatgggaaatatttatggaacggtgcagattgtttcaaatgtgcaagtaacgttggttcttcgcctacacgaatacggtgtgccggtgcgttacgcttgtcttcttcgtggttacttgcgcccacttgtgcgtgtaataaataacgattgccagtgcgttctacataaaccccttcgtgtgcatcagtgatttctttcaatttatccataatcgctgtcgcaatttcatcgccacgaacgctcttaccaaaggtttcatttaagccttcacattgcaataaatgatttgtggcatcagccaagcccacaatcgcaaacattcctgtaaaattagtgcgtttgataaatccctctttttcgaggaatgaactgttaaagaaattactttcttccactacaaatttgtggcgtttatccatggttgaaagagcacatttcgccacacgcggtaataattcattcagcatttcatccgcacttttacaggcgcgagcaattgtccctagacgtaaacgcgttaaggtgtaggcaccgccacattcaggcagtgcgttatagcaacttgctacgccgtattcttcgcctagatcggaaatatagtaagcatcgtttgcaaaagatggtttagaaaccaacaaacaggcttttgctgcaagttcagcaaactcacggcttgttttcgatttgtcataacgaatagtcatattcggtgttggtgcttcaagctcaatcacggcgcgtaaaatcaagcgacctgctttcgtatcatacggcccaatattggcatgacagaatgaatctggcacagttttatcaatatgatttaagaaacgtttaatttttatgtaatctttttcttcatcagtaatgaacggttcgagcaacacatcaagacgcccaacataaacaggataagtcgtaatggatggcacgtgggagtaaagaatcaataatccatcaagtgcctcatcaagatcttttggaggcggcaactctaaaaattcgcagcccttttggatatacacattgtaatcaggcaggatataacgaggacgataaattgcgtaaccttcacataaatcacaaatcatttgattctgtaaaaagccccattcttcatcggtataaccaagcaaatcgcgaggatcaaataaacgctcggcaatattgcctaatgtcattaatttttgatgataagtcagattattggctttaaccgtatcgagaatatcttgaagtgaagctaacataacgtcccctttgaaaatggtttcgtattgtacgcaatggtaacaaaatagacaattttgaaaacgtgaggaagatcacagttttagaaaataaacattatgcaaacggttactcaaaataaatatgtttttgatataaatgaactgacaaaattatttctgtttttgcatctttccttttatgataaaacggaatataaaaggtaataaatatgaagaaaaaagtacgcgttatacctcgcacatcttgggctgccacatcattatggacagcgcaatataaaaccatttcaatcttactttttgctctttctattttaggtattggagatgggcttattgtattatcaggtttaggatcgacaccttggactgtactttcacaaggtatagcaatacagacaaattttgatattggctggtcatcttttttaattagttgcgcagtaatgttggtatggaaacctctcaaattacgccttgggcttgggacattattaaatattatcgttattgctctatttctagggatcacaacaaaaatactggcaccgccaaccgcacttttttcacgaatgatcttctgtctgatcggtatattactctatggttttggaactgcgttatatctcacttgtcacttaggtgcgggccctcgagacggattaatggttggtatttgccaacgttttcatttaagcatcaacgtggtacgctcaagccttgaaatctcggtttgtttacttggttttttacttggtggtgtcgttggcttgggcactgtccttttcgccaccagcataggcagcgttgttcaattcttcttaaatattattgctcgtttgccacatattccgtatgaaaagtgatatttcagctaacgcattgtctatcgaaattaactctaaattcatttgagtctcttttcctgcgggtgggcaaaatgcaagatgcttatcgacatcattaatgggtttccagcgtctcggctgagaagaacgactatttggataaaacccgatagtcggaatattaaacgcactgctcaaatgcaatggcccagtagatcccgcaataaataaatccgcacaagccaaagaatgagcaaaatccactaaacctttattcttatcgtaaatgactacgtgtgaatcattcacaagatttgctaattcataggctttttcactttcgccaggccctgctgtcagcacaatattgcaatcaaactcagccaataagcctttaattaaatccgcatattgcgctaaagaaagattcgtagctgaaccaccagaaccactatgcacaaagatccattttttatttgcggaaagccctaaactctcttgtaaaaaaacgtgctgattttccaccgcacttttctcaaagattaaataaggcggtttaggttcaacaactggcatattatgcttttgcaaaaaagcccgaactaaatcttgattgtattccgcttctgatttttcagaacgagaacggcgttgtgttagacggtgattatagagaatttgaacccatttagtcgcaggtgcaaggcgatatttaattccacttttccaagcgagttttccattatgggtattggaaaagaaactaatcatgccatcaaactgctgcgctttgatttcctgcacaagacgtttgaaatccgttttgtcattttttttgctatcaataataacatcatcaataaatggacaaatttccgctaaaggcgcagtgtaactcggcacaagtgcggttaattttagctctggatttgaggctttcaacattgcaaaagcaggccatgcttgcataaaatcgcctaatttatcgttacgaataactaaaatcttttccataatttctccgctaaaataaaaaaaccgcacttgaaagtgcggtcgtattttatgttatttttgtggattataaaacatcaacacaatttaagtcttcgaaagattgctctaagcgtttagacatagattcttccattttacgtaaccaaacacgtggatcgtagtattttttatttggcgcgtctgggccttcagggttacctaattgaccttgaagatatgcttcatttgctttgtagaagttcaaaataccattccaagacgcccattgcgtatcagtatcaatgttcattttgattgcaccgtagccaattgcttcgcggatttcttcgcggctagaacctgaaccaccgtggaatacgaaattaattggttttgcaggaagattacgttctttagaaacgaactcttgtgatgcacctaaaatagatggttttaattttacattacctggtttgtaaacaccatgtacgttaccgaatgcagcagcaacggtaaagttagggcttactggatgcaattgatcgtaaacataaagcacatcagaaggttgtgtatataaacgtgattcatctacatcagagttatcaacgccgtcttcttcgccaccagtaataccgatttcgatttcaagggtcatccccattttatccatacgagcaagatattcacggcaaattgccatattttcttccattgactcttcagataaatcgatcatatgtgaagagaaaagtggacgacccgtttcggcaaaatgtttttcgcctgcatctaataaaccgtcgatccaaggtaataattttttcgctgcgtgatcagtatgaagaataacaggcacaccgtattctttcgctaaagtatgaacctgtttcgctccagcaatcgcccctaaaacatctggacgagtaccactcgttggtttgatacctttacctgcgtagaacgctgcgccaccatttgaaaattggataatcactggtgcttttacgcgtgcagcagtttctaacacggcattaacggagtcagaacccacacagtttacggcaggaatagcaaagttatgctctttagcataagcaaaaactttttgcacatcttcgcctgttacaacaccgggtttcacgatatctaataatttagccatacttgtgtttcctttttatgtttagcgggataagcccacaatttgaagaatttgtattgatgatggcatttttgatgccaccatcaatatgttatagaggaaaagtgcggttagtttttcgcacgtttttcaagaatttctactgcaggtaatactttgccttctacaaattctaagaacgcaccaccacccgttgaaatgtaagaaatcttatcagcaataccaaataaatcgatagccgctaaggtatcgccgccaccagcaatagagaatgcatcgctgtttgcaatggcgtgagaaatgatttcagtccctttacggaagtgagggaactcaaacacgccaactgggccattccataaaacggtttttgcatttttgataatttcagccaattgttctgctgatttatcgccaatatcaaaaatagattcatcatctttcacttcatttaccgctttttctgttgctgctgccgtttcagagaactctaaacctacacgcacatcaactggaactggaatatctgtatttgcggctaattctttcgcaactggaattaaatcagcttcatataaagatttacccacattgtgaccagctgccgcaatgaaagtattcgcaatgccaccgcccacaataatttggtcagcgatttttgaaagagaatttaatacttctaatttagttgaaactttagaaccgcctacgatcgcgaccattggacgagcaggttcttttaatgctttacctaatgcatctaactcagccgctaataatgggcctgcacaagcgattggcgcaaattctgcaacgccataagttgaagcttgcgcacggtgagctgtaccaaaagcatccattacaaatacatcgcaaagtgcggcatattttttacctaattctggatcatttttcttttcgcctttgtttatgcgtacgttttctaaaacaacgatttcgccatctttaacatccacaccatttaaataatcttgttctaaacgcacattaaagcctgcgttttttaagtaatcaacaactggttgtaaagaatcttctggtttgaattctccttcagttggacgacctaagtgagaagttaccatcactttcgcgcctttttctaaggctaattttaaagtaggaatggtcgcacgaatacgcgcatctgaggtcactttgccatcttttactggcacattaagatctgcacggataaatacacgtttaccggctaaatctaaatcggtcattttgattactgacataatctatcctcttgttaagttaaaattaaaattgaaaacttttcgtattatacctacttcgtgctaggttgtaacgatttagatcaaagaaattcttatttgctttggcaattcattacctgccattttttatcataacaaataaataattcatttcgactagccctcaaatacgcattttttaattgtggattatgttgcttcatccaaccaaaaagttcatctctacttaatttttgattcggtaattttaatgcgttaaataattcctgctccttagcaaaatattgctgggcagaatcaaaggcgcaactaccgtgtttttcccattcgccttgcaataatttctcgcccggagaaatcgccaaatattgtgctaataaaccttttggcaaggcgggtaaatcgcctttgcaaaaacgaggatgatctgaaacagtgcgagcatttgcattttgtggccatagcccatgtacaacccaaccaaaagtgcggttatttccacattgatattgagaggaataaggcaactgatcgccatatttttcacgctgaatatcacaaaatccaggcgaccaagataatgccaacatataataatcgaccggtgcctttgcgttttgcccaatatgatcattgcgcataatcacatcatagtttgcaaaaacatctggattttttaccgcacttttttcaatatccgttcgctttgtctcaaattgaggctcgaatttaggttcaaatttaggctcaaatttaggctcagatacttttgtttgcttcgtctgctcaattacgggcgaagatgattgatgtttagttttggttgtatcggtaaaatattgccaaattgctaatataacgagaacaataagagaaagaatggaagtaagttttttcataaattttgtttagtttttgtcaatcaagtttttgtcggctataattcgccgctttcaactctctattaaggatcacaatggcattactcatcactagcaaatgtaccaactgcgatatgtgcttgcctgaatgcccaaacgaagccatttccattggcgatgagatttatgtgatcgatcctatactttgtacggaatgtgtcggccattacgacacgccaacctgccaaaaagtttgcccaatcactaactgtattaagcccgatcctgaacatcaagaaaccgaagaacagctttgggaacgctttgtgatgattcatcattcggataaattgtaatttttaaagcaactgaaatatgacttattatcttctaaaagagtgcggttaattttgagcttatttttattatcaaaaaacgaaatttttcaccgcacttttatctataaaaagaactacattgagttacttttcttcacattaccccgccaccactggtaaatatccccattgaattaaaaatggaatgagcataatcacgacgccaattaataacgcaaacaccaaagcgaaattaccgccagaaacacgatatggcaatgttggattttcaatacgtgtacgccatgccaagctaattggtaaaattaagcaatagaacgcacacaacaaaccagcgtaacttaatgctgtaataaatccttcaggataaaacaatgcaaatacaagtggcggtaaaaatgcggctacagttaaaacaaagcgattatttggcaaatgataacgcttgaataaatcccctaatccttcaaatacaccaagcattacgcctaagaaagaagtgatcagtgcaagtgatgaaaacacacgcacaacctctcccataaaatgagaacctgtaatttcacgcgttgcattcactaagccatttagcgttgggtcagcttgtaaaatacgcacaaattcactttgacttaatacaccatgagttgctaactgccatacaaggtaagcagctaatggaatcgcagtaccaatcaaaatggcacgacgaaatttatcaacacttccacctaagtagctattcacactcgccataataacgtggaaaccgaaagaagtaaaaaatattggtgccgcagaaaccacaaaagcataatccaaaggcaatgccattaaattatctgttgctacttttggaagcatcataaacagcacaaaagcaaaggcgattaacttaccaataaataacacgcgagttaagccatccacgcctttcgttcctacaacgacaaaagaacctaataccaccgtaaagataataatcgccgttttaagcgacatcgcttccattccaaaagccgttggcaagcctgaaagtaaagatccaccaccagtaatataagcggctgaaagtgcataaagtaaaactaacaaactcaacgttgctaaaattcgcccaggaaccccaaaatatttttcagcgagcgtggcgacaccatcatccaactgatccgctgtttgatacacttctacaaacaacaacccactgtaaaccaacaaagcccacaagccaacgagcaataacagggtataaccaaagcccatacccgctgatgtaagcggcatagcaagcatacctgctccaatggttgtgcctgcaataatcagcgcactcccaaaagttttgttttttagcataaaattgtccttataatgttgtgtttaaaaactaatttaaatttgaccgcacttttctttatagtgtaaacggcaaacagaaagataagaatcattgccgccaatttgaatttgcgcgccttctttaatgacctcgccctgatcatttaaacgcaaaacaaaattagccttgcggccacaataacaaattgtttttaattcttcgagttgatccgcccaagcgagtaaatatttacttccttcaaaaagttccgcttggaaatctgtacgcaagccataacaaagcacagggatcttgagtttatcaacaacatcactcaactggtaaacttgttgtttgctaagaaattgagcttcatccaccaacacgcaatgcactttttctttttttaagtgctcattgatttcatcaaacaaattggtttccgagcgaaataaaaaggcatcttgcgaaatgccaatacgcgatgtgactttccccacaccaaaacgatcatcaatcgcagccgtataaactaatgtgttcatatcacgctcacgatagttataggaagattgtagcaacgtcgttgattttccagcgttcattgtggagtaatagaagtagagtttcgccatttttcctcctaaattgccggtaattccgccattgcccaacgaggtttaacatcaatagccagatcgctatgctgaccttgttttaaacgtaaaaaacctgtgtaagcaatcattgcaccattatctgtacaaaattgaggttgaggataaaacacttcgccacctaaattttgcattaagtgcgcaagcgtttctcggagttttttatttgcactcacccctcccgcaatcactaaacgtttatagcctgtttctttcaatgcacgcttacatttaatggcaagagtatccaccaccgcatcttggaaagcataagcaatatctgctttagtttgctctatcagttcgccctcgtttttaattgcttgattaactgtatttgcggcaaatgtttttaaaccagaaaaactaaaatcaaggcctgcacgatctgtcattggacgtggaaatgtgaaacgatttggcgtacctttttccgctaaacgagaaagtgccgcgccgcccggataatctaatccaagtaattttgctgttttatcaaaggcttcgccagcagcatcatcaatagattctcctatcacttcatattttcctacaccatcgacacgcactaattgagtgtggccacccgataccaacagagcaacaaaaggaaagtgcggtgaattttcatcaagcattggcgcaagtaaatgcccttccatatgatgaacaccaatcgcaggaacattccaagcataggctaaagaacgtgcaatcgtagcaccgacaagcaatgcgccaacaagcccagggccactcgtataagcaataccatcaatatcgctcgcggttaaattggcttcctctaatgccgctttaataagaggcgctgttttacgaatatgatcgcgtgatgctaattcaggaaccacaccaccataatctgcatgcagggcaatttgagtataaagttgattagcaattaaccctttttcttcatcataaatcgccacacccgtttcatcacaggaagtttcaatgcctaagattttcattgattttcttaatttattacctaaaatgttgtgcgattttaccctgtttaagcggttttaaccagttgaaaccacaaatattaaggttaattggcattctatcctttactttttccctaaaaatagattagaattgcgtcctttattaaatttgtcatttacacacaggtgctttggcaaaaataaaattttaaattgcaattaaattaaactcattgaggtgattggcttatgcctgtaattaaagtacgtgaaaacgaatcatttgacgtagctttacgtcgtttcaaacgctcttgcgaaaaagcgggaatcttagctgaaatacgcgctcgcgaattttacgaaaaaccaactacaattcgtaaacgtgaaaatgcaacacttgcaaaacgtcacgcaaaacgcaacgctcgcgaaaacgcgcgcaatacccgtttatactaatttatagtattttctgactcgagttaagacaaaccgtgaatcctttggactcacggttttgttactttaagcacaacaaaaatctacgccaaaaacgaccgcactttcacaccacgatcacggaggctcgacaatgaaaggttctattccacgcccctttattgatgatttgctgacaaagtccgatattgtcgatgtgattaacacgcgcgtaaaactaaaaaaagctggccgcgattatcaagcctgctgccctttccatcacgaaaaaacaccatccttcacagttagccaaaagaaacagttttatcattgctttggttgtggcgcacatggtaatgcgatttcctttttaatggactatgacaaacttgaatttgtcgaagccattgaagaacttgcagctatggcagggcttgaaataccttacgaaaaacgtgctaatcacagcggaaaacctcaagctaattaccaaaccaaacgaaatctctatgaattaatgcaagagattgccacgttttatcaaaaccaattgccattaaattctcaagcacaagaatatttacaacaacgtgggctttcacctgaaattattgagcgtttccaaattgggtttgtgccgaatgcaatggatactgtactgcgtaaatttggtgttaatcgtgaagaacaacaaaaactcattgaattaggcatgctttctcgaaatgatcgtggcaatatttacgataaattccgaaatcgcatcatgtttccgattcgtgataaacgtggtcgcacagtggcttttggtgggcgtgtattaacagatgaaaaaccgaaatatctgaattcgccagaaaccattacttatcataaaggtaaggagctttatggtttgtatgaagccttgcaaaccaacgatgaacccaaacaattacttgttgttgaaggttatatggatgtagtggcattagcacaatttggcgtggattatgcggtcgcttctttaggtacgtccacgacatcagaacaaattcaacttatttttcgttcgaccgaacaggttgtttgttgttacgatggtgaccgtgcagggcgtgatgctgcttggcgcgcactagaaaatgcgttgccctatttagaagatggcagacaactcaaatttattttcttgccagatggagaagatcctgatacttacattcgtcaatacggcaaagaaaaatttgaagaatacatcgaaagtgcgcaatctttaagcgagtttatgtttgcacatttaagtcctcaggttgatttttccactaaagaagggcgcggaaaattagttgcgctagctgcgccgttaattcaccaaattccaggagaaatgcttcgcttatcgctacgcaatatgcttgctcaaaaacttgggatttttgatcaaactcagctggaaaatcttattcccaaacaattagaacaagccaatacacaacaaaaagtcactcataataagatcaagaagacaccaatgcgaatggtcatttcattgcttctgcaaaatcctgagttagtaaaacgtatgtctgaaagtggcgtgcaagcattacgtgcggaagcagggtttgaaattctggaaaaattgaccgcactttgtcgccaacgagagggcattactacagggcaaattttggaatacttccgcaatacatcttacagtaatccccttgaaatactggcgacttgggatcatttattagacgaatccgacataatcaacgcattttctcaaaattaccgtcgcttaaatattcaagctattgagcgcgatattgaaatgcttattgctaaagaacgaacagagggtctcactaatgaagaaaaaacggtacttgtacatcttttagctggtaaagaacagcagaaaaaacagttagtgaatccgctataacaatggtagaatctcaagttcataaaaaatcttatcttctcaatcacatcaagcaaaacgagtataaaaatggaaaaaaatcaacaatctacggctgaacaatattcagaacaaattgagcaattgatggagctaggtcgtacacaagggtatttaacttttgctgaaatcaatgacttattgcccgaagatgctattgatcctgaatattacgacaaattgctacaaacgttgcaaaatgatgcaggtatccctgtattagatgaagcaccagaaagcgatgatatgatgttgagtgataccatccctgatgaagatgcagtggaagaagcaactcaaattctttcaaatgtagaatctgaaataggtcgaacaacggatcccgtacgcatgtatatgcgcgaaatgggaacggtggatcttcttactcgtgaagatgaaattagcattgcaaaacgtattgaaggagggatcgatgaagttcaaacctctatcgcagcctatcctgaagcattaaatggattactaaaaaattatgatgatgtagaaaaaggtaatttccgtttgaccgatttaattacgggttttgttgatccaaatgccgaaatagaagaacacagcggacttgatgaagacttttctgacgaagatgatgaagaagaatctagtaatgcagatgtggaagacaatgaagatgaagaagacaatgaatcagaatctacatcagattcaagcgactctgataacagtattgatcctgaagttgctcgcgaaaaatttcagcaattaagagaacagcactctaaaacccttgctgttattgaaaaacacggccgctctggaaaacgtgcccaagatcaaattgcactacttggcgaaatttttaaacaattccgtttagtaccaaaacaatttgatttactcgttctatcaatgaaagaaatgatgaaacgtgtgcgctaccaagaacgtcagctacaaaaaatattagtggatatagcaggaatgccaaaggatgattttgaaaaaattattaccactaatggcagtaacagtgaatgggtagcaaaagcattaaaatctagcaaaccttgggctaaacgtttaattaaatatgaagatcgtatttatgaagccttaaacaatctagcgataacagaagaaaatactaaacttaccattactcaaatgcgtgacatttgcgatgcagtcgcacgaggcgaacaaaaagcacgtcgagctaaaaaagaaatggttgaagctaacttgcgtttagtaatttccatcgcgaaaaaatacacaaatcgaggtttacaattcttagatttaattcaagaagggaatatcggtttaatgaaagcggtagataaatttgaatatcgacgaggctacaaattctctacatatgctacttggtggattcgtcaagcaatcacacgctctattgcggatcaagcgcgtacaatccgtattcctgtgcatatgattgaaacaatcaataaacttaatcgtatttctcgccagttgttacaagaaatgggacgtgaagcaacaccagaagaattggcagaacgtatgggaatgccagaagataaaatccgtaaagtactgaaaattgcaaaagagccgatttctatggaaacacctattggcgatgacgatgattcacatttaggcgattttattgaagattcaaccttagaacttcctcttgattctgccacagcacaaagtttaaaagttgcaactcacgaagtgctagaaggcttgacgccacgtgaagcaaaagtattacgtatgcgttttggtattgatatgaataccgaccatacacttgaagaagtgggtaaacaattcgatgtaacacgcgaacgtattcgtcaaattgaagcaaaagcattacgtaaattacgtcatcctagccgttctgaaacactgagaagttttttagatgaatagagagaaacataaaagagaaaaatcgatctaatcttaaaaaatcagatacatttgtttaaggactaaattctataatccgcagaatttagcccttttacttaaagcaccacattaatatgcattcaaatttcaactattttagttagataagccattaacatttaacaatggcaacaaatattggttatttaaaacattttaatcataaaaaaatctgcgccccaattagctggtttatttattcagctttaaggcacagattaaagtgcggtaaatttttttgatatttggcgtaaattatttatttaatttcgctttgtaagttggattcattaagttttctacagaaagaatgtcatccaattgttcttctgttaataaacctttttctaacacaacttcacgtacgcctttgcctgtttgtgcacagattttacccactaagtcgccgttgtggtgaccgataaatggattcaagtaagtcacaataccgattgaattaaacacgtagttttcacaaatttctttatttacagtgattccatctacacatttatcacgtaagttcacacaagcattggttaagatgtcgatagattcgaacattgcttgaccaatcactggttccattacgtttaattgtaattgacctgcttcagatgcgaaagtcacagtggtatcgttaccaattactttaaagcacacttggtttaccacctctggaacaactgggtttacttttgctggcataatagaagaacctgcttgtaattcaggaagattaatttcttttaaacctgcacgagggccagaagaaagtaaacgcaagtcattacatactttagaaagtttcactgcagtacgttttaatgcaccgtgaaccatgacataagcaccacagtcagatgttgcttcaattaagttttctgctggtacacaagctaatccagtcacttcagcaagatgttttacaactaattctgtatagccttgtggcgtatttaaaccagtaccgattgcagtcgcaccaaggtttacttcaagtaataaacctgctgtacgttttaagttacgcacttcttcttcaagtaatacggcgaaagctttgaattcttgaccaacagtcattggcaccgcatcttgcaattgggtacgacccatttttaagatatttgcaaactcttttgctttattatcaaaaccgtcgtgtaaatattgaattttatcgatcaattttaagatgctgttatacactgcaatacggaaaccggtaggatacgcatcgttggttgattggcttgcattaacgtgatccatcggattaatcacgttatattcgccttttttatgaccaattttttcaagggcaagattagcaaccacttcattagtattcatattgacagacgtacctgcaccaccttgatatacgtctgatgggaattgatctaagcattttccagtggtaagaatttcatcacaagctgctacaatcgcttttgcaatatcacttggaattgcacctaattcgccattggctaaagccgttgctttttttaccattaccataccacgtacaaactcaggcacgtcagannnnncattccattcattaattaattaatgaatgaatgnnnnngtatttaaagaaagtgcggtcaattttgccaacgaaatatcaatctctaacagatcgcccgccagcacgccaggggaggacgacatctgcatcgcattcaagccattcgcccacgcatcatcgtaacttggcaacgttatcactttaaacggtggcgtcgcaaagtattcagcaagctgggttttaccgctggaggaaagtttggtggaaagggataatttgctgttcatagattttgtaggggctaattatattagccccgatatttcaccaataattgggcaaatgtaattcacccctacgattaacgaaccaaagatgcaggttcttccacattcttcaacaacgcatatttttcgatccaaccgatcacgccatctaggttttcttttttcatcaggttagtgaaaataaacggctgaccgttacgcataagacgagcatcgcgttccataatacttaaatccgcgccaacaaatggtgcaaggtctgttttgttaatcactaacaaatctgaacgagtgatacctggcccacctttacgagggattttttccccttgagccacatcgatcacaaaaatcgtcacgtctgccaaatcagggctaaaagtcgctgaaaggttatcgccacctgattcaatgaacacgatttccacatcagggaaacgagccaccatttcgtccacggcttccaagttcatcgaggcatcttcacgaattgctgtgtgcgggcaaccgcctgtttccacgcccataattcgctctggtggaagcaaactatttttcgttaaaaattccgcatcttcttgggtgtaaatatcgttagtaatgactgctacgctatattttgacgctatttcacgagtgagtttttcaattaacgcggttttgcctgcgccaacaggacctgctacgccaattttaatgtagttacgcataatgttccttttgtttatcatcgtagcaactgtgttgctcatgggtgtaggggcaagttacatttgcccctatatatcaacgaatgttcaagggcaaatgtgatttgcccctacaagtaaaatctcaataaaaaataaccgcacttacgacatataaagtcgcgtataaagcacttcgtgttgcatagcccgaatatcattcgccagcgttgccgcaccaagccattcttcgtcagggtcaaagcttaattccaccgcttgtacgagcgatcctcgcaagtcaaacaaaatatcttgtccatccatttggctgagaggaattagcttcacgccgttagtgattacaccaactgctgtgttgtagtagaacgcatagagtgtgtcggctttggttaagcccatggcttgagcaaccatcgcaaacactattgggaaatagccctgtactcgtttttctgcaatcgcttgctggtaagctgtgagcaacgcatgtgtttcatagcgaataaaaattttcagcaatcgcacaccgagtttgaaactcccttcacgactttcgcgtgccactttggtggcggaaagttgccaatccagttcgcacaagcggtcaaaattcccctcacacattgcatcaaaggcaagagaaagatacgccccgtcgttgtaaatccagttttgtaaaagctgggtttgcacatattcttctagggtcgctttgctttctaccacacgttgctggacgaaggtttccaagccattggaatggttaaatccaccaatcggtaaggtgggatcgaccaagtgcaacaacgcacctaaatccgttaaagtgcgggttaatgtttgtgccaatgtccatctccgtgatgatgatagccatgatgatcatgcgaatggctatgagaatgtccgtgcccttgtgcagaatttgctcttaacgcttggcttaaacggcgttctgctttttgcggatgaaatcccgcagcttgcagccattcaaacatcggcttatcgtaaggtaatgttacttcatcgccatctaaaaaaagcggcgaatgtttgttgccgatttcataacaagctcgagccatttcaggcaaggttttcggcgacagcacaatcacgtcactcggtaaaatttcaatcgcaatcactaattcatcgctgataaacactacatcatcgtgtttcaagcgttgcccctcttttagcaagcgaaatgctacttcacgccccgtatttgtagttttacgcaaaatattccgttcgctttcataccactgcaatgctattcgttcaatgggctgtgtggtaattttgccatctgcttgaagtgcggttaaatttcccaaaatattttctataatagggagaattgggttaattattttcatctttcctctataaatccactttcttctcttcgaaagaaaaactacagctacaatgatttcttatttatcaagtaagaggcgtatcgtacacgcccttttacactaattcgtctatgaaaacagtcctttagaataggaaatatcgctgacccaatggtacgctatccactggttcacaggtaattaactctccgtccactcgaacttcataacgttcagcatcaacagtaatatttggtgttacatcattatgaaccagatcttttttacccacgttgcggcagcctttcacagcaatggtttctttgtgtaaaccgaacttcgcacgaatatcggctttttcagcggcttgtgaaacaaaaaataccgctgtttgtgccgttgctaagccttgtgcaccatacattgggcggtagaacactggctgtggcgttggaattgaagcatttgggtcgcccattttggcgtagctaataaagccttttttaattacgacttcaggctttacgccaaagaacatcggtttccataacacgatatctgcgattttacccacttctaacgagccaatatgctccgcaataccatgtgcaattgctgggttgatggtgtatttcgcaatgtagcgtttaatacggaagttatcgtttccttcattacctagctcaccacgttgcattttcatcttatctgcagtttgccatgtacgaattaccacttcaccaatacgccccatcgcttgagagtctgaactcataatggagaagacgcccatatcatgcaaaatatcttctgccgcaatggtttcagggcggatacggctatcggcaaaagctacgtcttccggcacgcgtttatctaagtgatggcaaaccatcaacatatccaagtgttcatcaatggtgtttttggtaaacggacgagtcgggttggttgaagcaggtaatacgtttgaatacatcgctgctttaatgatgtcaggtgcatgaccaccacccgccccttccgtgtggaaggtgtgaatgacacgtccatcaattgctttcatggtatcttctaagaagccactttcatttagcgtgtctgtgtgaatggccacttgaatatccatttcatctgccacttttaatgcagaatcaattactgcaggcgttgcgccccagtcttcatggatttttaaacctaatgcacccgcttcaatttgctcacgcagaggatctagggttgaacagttgcctttaccaaaaaatccgacgtttacaggcaaggcttctgccgcttgaaacatacgttccatataccatgcgccaggggtacaagtggttgcgtgtgtaccatcagccgggccagttccaccaccaattaacgtggtaacgccactttcaattgcatgttgtgcttgttgcggacaaataaagtgaatgtgggtatcaataccgccagcggttgcaattaaatgtgcaccgttatgaacttctgtgcttgcaccgataatcatgtttggtgtgacgttatccatggtgtcagggttacctgcttgtccaatgcccacaatacgcccatcacgaataccaatatctgctttgataatgcctaatttagcatcaatgatcatcacgttggtaatcacaaaatccaatacattcggattgtcgcgagttgccgtaccgctttgagccatgccatcacgcacgcttttaccgccaccaaatttacactcgtcgcctttggtcaataaatcttgttcaatggttgcccataaattggtatcgcctaaacggactttatcgccaactgttgggccataagttgctacgtattgagctcttgaaattgttaatgccatcttgccctaccttataatttgccatcaatttgattatggaaaccataaatgatttggttaccaccaaaagcaactaattccactgatttcacttcaccgggttcaaaacgcaccgcattgccagatggcacgtttaaacgcattccacgtgccaaagtgcggttaaatttaagggcattattggtttcaaaaaaatggtaatgcgagccaacttgaattgggcggccgcctgaattggttacttcgatttttacggtttttctgccgacattagcgagaatatcgccttcggctaattggtattcgcctgggatcatatctttgttccttgtagggtgstccccgcaatgnnnnncattccattcattaattaattaatgaatgaatgnnnnncaccctacggttatctgattggattatgcacggtaacaagttttgtaccatctgggaaagtagcttcaatctggacttcatgaaccatttctgccacaccttccatgacatcatcaacggttaaaagtgttgcgccatattgcatgacttccgctacactcattccgtctcttgctgcctcttgtaaatggctagcaatataagcaatagtttctggatagtttaatttaacgccgcgtgctttgcgttttgccgcaagttcgcccgcaaggaaaagcatcagtttttcttgttctctggaagttaagtgcatattttcattccttaatttattatacgaaagtcagcgaattttacgtaaaaaatctaaaataggaaaaatattttgtcagaattttttgtaagccccttgaaagaaaaaaaatcctccttatatagaaaccgcacttacaaattcttaagaaggaaattaatcatgaatattcgtcctttacacgatcgtgtaattattaaacgtgaagaagtcgaaacccgttcagctggcggtatcgtattaaccggttcagcagcgactaaatcaacccgtgcgaaagtattagctgtgggtaaaggtcgtattttagaaaatggcaccattcaacctttagatgttaaagttggcgataccgtaattttcaacgacggttacggtgtgaaaagcgaaaaaatcgatggtgaagaagtgttaatcatttctgagaacgacatcctagcaattgtagaataattattaaataagggaaaagaaaatggcagcaaaagacgtaaaatttggtaatgacgcacgcgtaaaaatgcttaaaggcgtgaatgtattagcggatgcagtaaaagtaacccttggcccaaaaggtcgtaatgtaattttagataaatcatttggcgcaccaactatcactaaagacggtgtgtctgttgctcgtgaaatcgaattagaagataaattcgagaacatgggggcacaaatggtgaaagaagtggcatctaaagcaaatgatgcagcaggtgacggtacaactactgcaactgtacttgcgcaagctatcgtaaatgaaggcttgaaagcagtagctgcaggtatgaatccaatggatttaaaacgtggtattgataaagcagtaagtgcggttgtttctgaacttaaaaatttatctaaaccttgtgaaacagcaaaagaaattgaacaagtaggtaccatttctgcaaactctgacagcattgtgggtcaattaatctcacaagcaatggaaaaagtgggcaaggaaggtgtaattactgttgaagatggtacgggtcttgaagatgaattagatgtggttgaaggcatgcaattcgaccgtggttacctttctccatatttcatcaacaaaccggaaactgcaacggttgaattagataatccatatcttcttcttgtagataaaaaaatctctaacattcgtgaattacttcccgtgttagaaggcgttgcgaaagcaggtaaaccgttattaatcatcgctgaagatgtggaaggcgaagcgcttgcaaccttagtagtaaacactatgcgcggtatcgtgaaagttgcagcagtgaaagcaccaggttttggtgatcgtcgtaaagcgatgttacaagatattgcaattttaacagcgggtactgtgatttctgaagaaattggtatggagcttgaaaaagcaacattggaagatttaggtcaagcaaaacgcgttgttattaataaagataacacaaccattattgatggtatcggcgatgaagcacaaatcaaaggtcgtgtggctcaaattcgtcagcaaatcgaagaatcaacttctgactacgacaaagaaaaactccaagaacgcgtggctaaattagcaggcggtgtggcagtaatcaaagtgggcgcagcaactgaagttgaaatgaaagagaaaaaagaccgtgtagatgatgcactacatgcaactcgtgcagcggttgaagaaggtatcgttgctggtggtggcgttgcattagttcgtgcagcagcgaaagttgcagcaagcctaaaaggtgacaacgaagaacaaaatgtgggtatcaaacttgcattacgtgcgatggaagcgcctttacgtcaaatcgtcactaacgcaggtgaagaagcatcggttgtggcaagtgcggttaaaaatggcgaaggaaactttggttataatgcaggaacagaacaatacggcgatatgatcgaaatgggtatcttagatccaactaaagtcactcgttctgcattgcaattcgcagcttctgtagcaggcttaatgattaccactgaatgtatggtaactgatcttccaaaagatgataaagccgatttaggtgctgctggaatgggcggtatgggtggaatgggcggaatgatgtaattcgcttatacgagtaaaaaatctatcccaacagaaaatttgagctctatatgacttagggctcaaatctactaaaataggggatattttttattaccctattctaaatttatatatgataaaaataaaaaaacccagttttaaactgggttttattttatctattggataaattattctgcaacaacgattacatctaatgctgcaaatacttcaccgtgaagttggaaacgaacatcgtggtcaccaagagtacggattggaccgtttgataaacgaacttcacttttcgcaattttaacgcctgctgcagttactgcctctgccacatcacgagtagtgattgcgccgaataaacgaccttcatcacctgctttagatgcgatagtcacagaacctaatgcagtaacttctgctgcacgagcttgagctgctgcaagatttgctgccgctgtcgcttctaattctgcacgacgtgcttcaaagtgttcaatgttagctttagttgccataacagctttaccttgtgggattaagaagttacgtgcaaaacctgatttaacatttacttgatcgcccacttgacctaagtgaacaattttatctaaaagaattacttgcattaccgtatctccttaattactgatgattgtcagtgtatggaagtaacgctaaatagcgagcgcgtttgattgcacgagctaattgacgttggtacttcgcacgagtaccggtaatacggctaggtacaattttgccgctttctgaaatatagttctttaatgtagcgatatctttgtaatcgatttcaacaacattttccgctgtgaaacggcagaacttacgacgacggaaataacgtgccatttggctagtctcctaatctataaattcgatttgctcggcatgtaaaactaattggcataacccactttgggttttatgtgatgtaataaatcccaccaccaaaattttactaccgaccgtaatgctttgagttttttctatcaattgattaccactaatttgaactggcatctttaaccaagcttgacgtgtgaaaccactttcaatctgatcagaacgatgttctaacaaaaacttgcaatgctcaattccactagggctttttaatcgctttggtaactgagaaacgactcccataaccgaaaaacgattatcaattttcaaattactcttcagcatcctcaaaatcgttgttttcaacttcagctaaaggtttacgttcttctttagccgctttcattggggacgcttcggttacggcgtgcttagtatggataacaagactgcgtaatacagcatcgttataacggaaagtcgtttctagctcgtcgatgacttgttgaggcgcttctacattcataagcacataatgtgctttgtgtaatttattaattgggtacgctaattggcgacgaccccaatcttctaggcgatgaacttgaccaccagcttcttttacagaaccggtgtaacgttcgatcatacctggtacttgctcgctttggtccggatgaaccataaacacgatttcgtagtgacgcattactgctccttacgggttaatcagcctttgacgtagatcagccaccaatctgcaaaggcaaggaacgaaaaattcaatgtggctaagggttgcggattataccgatttttttacgttccgcaaccaatttgagttctttttgaacaaaaaagaaggtcgatattgtaacaatatcgacctatctcaaatcttctgtaattaacgactgcggaaaataatacgacctttacttaaatcataaggggtcatttctacagtcactttatccccagtcaaaatgcggatatagtttttacgcatttttccagaaatatgtgcagtaaccacgtgaccgttttctaactccacgcgaaacatagtattcggtaaagtctctaaaattgtgccttgcatctcaatgcaatcttctttcgccattgtatcctctaaaaataatcgattttttatccgcactttaggcggaaaagttaagaaaaacgggcggattatagccgtttttaatgttagacgaaagattaaaataaaattgaacagaaaaaaaataacccctataatgcaaaagccttttctcagtaagtatgatcctcaaatgcatataaattacgttattagtcttacttcagcatatcaacgacgagagcatattcaaaaagaattctctcaacaaaacattccttttgaattttttgatgctttaaaaccttcaaaagaactaacctcgttaatagaaaaatttatccctaatctactccatgcaaagttaactgagggagaaaaagcatgttttatgagccattacatgctatggcaaaaatgcttgtccgaagatctaccctatatttacatttttgaagatgatgtattattaggtgagaatgcagacaaatttctagctgaagatgaatggttagaagaacgttttaaacaaactgataaatttattttaagatttgaaacattcctaaatttttctaaatgtaaagataaaaaaattaaaccttattcaggtagaaaaatattaaaactagtatcagaaaattgtggtgccgcagggtatgttatatctagagaagcagttaaacaactaagtgctcatatctgttcgctcacatccaaccatctactcgcgatagatttattaatgtttaatatatttaatcagtctacataccaggtatcaccaggtgtatgtgttcaagaaggacagctatatccaaaggatataaaattacatagtcagttagaaacggaaagacaaaaatatcttagtgtaaagaaaaaaagaacactaaaaacagtattaatatctttagcaggaaaacctaaaaaaatattgagaaaaatatacagaaagctatttatttctaaacacatagtaccatttagataatccaacattatactttgataaagtaaaaatatgactaaattaataacaatttcactaacttgccaaaaatttcaatatggcggaggaatggaaagatatcttcttgatattgttaatggattatctaagacaaatattacacctaaaatctactctgccaaatttgatactgcattacctgaatacgatttgattaatccagttaagattaatctttcttttgtgcctaaaaaatggagaacctcgtttctttcctatttttcaaataaatataaagagatatcagaagtctcacttaccacctcttataccctatctgacgtggttatttatggtggaaatcataaaggatatctacaagcatcaaagaaaaagccaagcatatcagatcgatttaaaatcatgggtgaacaaaaatccttaaatcaatccaaatatgtcatcgctcattctgcattgatgaaaaaagaactcgttgagttatatcatatcccagaaaacaaaattgatgtgatttatccccccattaatacagataaattcacacaaatcaatgaagaagaaagagtaaaactcagagaaaagttgggtttcaaaaaagatgaaatcatttacctatttccttctactgggcatacgcgaaaaggctttgatattttaaaacaatattttgaaaacacccagttacctattcgcttagtggtagcaggaacgcctgtagaagaaaatcctaaaatatcttcgcttggtttttgcaaaaatatgcctgaattatataaagcggcagatttcaccattatggcatctcaatatgagccatttgggcttgttggactagaatccatattatctggtacgccagttattttttctgaaaacatgggatgcctagaagtattacaaaacgaatttggctatacattttctagagaaaacataagtactttagatgatgcaattcaaaaatcagtaaaacaagcatctgaacagcaacaccgtattttcaatccaatggactgtattcgttataatccaagtttgagtcatcatattaaaacaatactggaactcatcgctaaatgatattgcccatgactgttacactaaaatttacaaaagaaatacaagctctataataaccgcacttttcttattaaatagtacttatgaactcaaaaaaacacttaggccatacggcgcgtaaacgctttggtcaaaactttttacataatacttctgtcattcaaggtatcgtggcggcgatttacccacaacccaatcaattcttggtggaaattggtccagggcttggtgcattaacagagcctgttggtgaacttgtcgatcatctgactgtggtagagcttgaccgagaccttgcagaacgtttacgtcatcatccatttttacatcaaaagctaaccgttattgaaacggatgcgatgcaatttgattttggtgagctttatacaaaagaaaatttggcagaaaaagggcaaaaattgcgtgtgtttggtaacttgccttacaacatttctaccccattgatgttccacttgtttaaatatcatgatgtgattcaagatatgcactttatgctgcaaaaagaagtggtaaaacgcctatgtgccgcaccaaatagcaaagcttatggtcgtttaacgattatggcgcaatatttctgccaagtgatgcctgtgcttgaagtaccgccttcggcattcaaacctgcaccgaaagtagattcagccgttgtgcgtttaattccgcataaggaattgccgcaccctgtaaaagatttatattggttgaaccgtgtttgctcccaagcgttcaatcaacgtcgtaaaacattacgcaatgcactctcaactctattttcacctgaaaatctgaccgcacttggtattgatttaaatgcacgtgcagaaaatttggctatcgcagattatgcacgtttagcgaactggttagcggataatccaccagcagatgtcaataaagatgaaatcttagattcagaagagtaaaaataataaaggtgtaacccttgttacaccttggctttctacataaaacgaacaatttctttaccttgcatttctttaatacgttgttgttctttccatttttttctatttaaagctcgtataatattttcttttatccgagttaaacgctgtttcaatgtctttttcttacggatttttggacgtttttgtcgttctttttccaatccgcttgttaatacacttttactttgattcgcttggagttcttgaatacaaattgctggattcagttgatagacaatataattatcaacatcaactaatttattaaaaataagttcatcaactgcaacaatttcatcagaaggaatattctttaaatattcaattacatatttagccgcaccttgagaaataatataacctgccgtcccccagtgagttgattttaaaatatcaaagttcctagaattaaaaggtggaattttagtttgtttctcaagtttaactggccgtaaaaaagtttctaaacgaataataaaaatatcattaaaatcaaaacgtgtttttaaccattcattttggttcaaaaatacttccgcattctcgccaagaattacatcatcttcaaaaattttgagatattccaaattttcattcacacacttattccataataagaaatggctaattaaacagcctttttctcctttagtaagtattctagattcctctatattatgtaatatggagtttgattgattgattgattgattgattgattgattgattgattgattgattgattgataagtgtacgcattaaagaaactaaatgaaaggttttttgattcaaattgcttagtaatatgtttgcgacgttcagttgcattttccatactaatgacaatattttcaatagcactcatatttaaataaaaatggaaataactaaatttttcgcattctactatacaaaaagaataaatcaacaataaaagtctgtgttaaaattctcaaaatttatttataaaagagcggtcaaaaatggcaacctatttcgtcggtgatttgcaaggctgttatgatgaattacagcttttattagaacgtgtagatttcaatcctacgcaagataaactttatcttgtgggagatcttgtggcgcgtggggataaatcacttgaatgtcttcgttttgtaaaatcacttggtaatgcagcgcaaaccgtactaggcaatcacgatttacatttaattgcgaccgcactggacattaaaaaagtgaaactgcgtgatcgtgttgatgccatttttaatgcgcccgattttgatgagctgattcattggttacgtcatcagccattacttgtgcataatgaaaagttaaacttcctgatggtgcatgcaggcatttcacctgattgggatttgaaaactgcgaaatcttgtgcggctgaagttgaacagattttacagcacggcgattttcattatctcattgaaaatatgtattctgaacagcctgatcgctggtcgccagatttacagggcttagcacgtcatcgctacattattaatgctttcactcgaatgcgtttttgctatttggatcatcgctttgattttgcttgtaaatcccctttaaaagatgcaccagcggagctcacgccttggtttaatttagataatccactttataaacagattcccattgtctttggacattgggcaagtttagtcgatgagcctactccaaaaggtatttatgccttagatacgggttgtgtgtggaataatcgaatgactatgttgcgttgggaagacaaacagttcttcacacaaagcgcggtcaaaaattacagtgatttttaaggaaacactatgctctcgcttacgactgaatcttgcgaactgttcaacattcctttctaccaattcgcccaaatgaaaaaattctgcccagaaaatattccagcgattaaagcggattacaaattacattgggataattggaaagcgataattcaatctgtttcagcacaactcagtacgccttttgcgaaaccgcatattgaaagctggaccaatggttggcaagtgcggactcatttcttcgcttattttaaatacgagtttaaccaaaattctgccgcaatcttttctgtgctattaaatcgtcgccgactaagagtgtgtttagattggcattgctatcgtgcagatcgctcacaaattaatgtgcaacaatataatcagtggcttgatcaatttgatttcaaacaatttgctgattttgagatttggcgagaggatgaaagtgaatatgatgattttcgccaagtgaaggtcatttctgaaaaaaatctgatcttacgttcagatgaggatttttggtgcattgggaaaagtattgaaaaagccgagttaaatcaaatagatcccgttttatttattacgcacaccattcaacaattacaaccgctttacgatcgctgccatcaataaagtatacccttagtataaataattgagctctacattatgcagagcccaatatttcagcaaattaataaactatccaaatttatggcaacagtttaaagtgcggtaattcttattgatgtttttaactacacatcataagtagttgatgctgtattaccgccacgaccagtccagttggtgtggaaaaactcgccacgaggtttatctgtgcgttcataagtatgagcaccgaagtagtcgcgttgtgcttgcaataagtttgctggtaaacgtgctgaagtatagccatctaagaaagtaatcgcagacgccatacaaggcattgggatacccacttcgatagattttgccaccactttacgccagtcacttaatgcgttttctaaaatgcctttgaagtagctatctgaacctaagaaaacaagatttggatttgcttcataagcatcgcgaatattacctaagaaacggctacgaatgatacaaccttcacgccataacaacgcagttgcaccatagttaatatcccaaccaaattgttctgaggcttcacgaatcagcataaagccttgtgcgtaagaaataatttttgacgctaataatgctttacgtaccgcttcaatccatacttttttgtcgccttcaactggtgtaatagttttgccgaataattgattagccgcaacacgttgatctttaaaggaagacacgcagcgtgcaaaaacggattcagtgattaaagttaatggaataccaaaatctaacgcattgatacctgtccatttacctgtccctttttgacctgcagtatccaagattttttcgactaaaggttctccacttgcatctttatagccaagaatgtcagtggtgatatcgattaaatagctatcaagttcagtatttttccattctgcgaagatggcttgcatttcttcatagcttaagcctaaaccttcttttaagaattggtatgcttcgcaaattaactgcatatcgccatattcaataccattgtgaaccattttcacaaaatgaccagcaccttcgccgccgacccagtcacaacaaggttcgccttgttctgttttagctgagattgcttggaaaataggtttcacatactgccacgcttcttgattaccgcccggcataattgaaggcccgtgacgcgccccctcttcgccaccagacacacccgaaccgataaagcgaatacctttctccgccaaggctttcactcgacggttcgtatccgggtagtttgagttaccgccatcaataatgatgtcgccttcttctaaatgcggtagtaatgcttcaatgaattgatccaccacatcgcctgcgcgtaccattaacatcactttacgtggtttttctaatttagcagctaaatcttctaaagagtatgctccgataatattggtgccttttgccgcaccttgtaaaaattcatccacttttgaagtggtacggttatatgccacgactttaaacccgtggtcgttcatatttaaaatgaggttttgccccattacggctaagccgataacaccgatgtcgccttttactgacattgttttctcctgttggattactaaatctttgtttatgatggggctaatataattagcccctacatgtttgtctatgatgtagataaattgtaggagggaattacattcgcccttttaatctacatataattgatcttgttcccataaaataggattattttgaatatattcataaatctgcaaataggatttttcatcacgaataatatgttcataataatttcgctgccaaacatcaaaaatttcactattttttcttgcccaagatgttacacctgctttaaatccacgaactattgagccaattgtttgagatgttcccttttgtggcaactgcgttattctcgattgtaggggcaaattacatttgccctttacctgttcaataatttcaataataccgtgtaaatgatttggcataataacaaattcatcaattcgtacttgtggaaagaacattggaatattttcccaacactgttttacgtaattccctaaatcatttaattgcatttgttgattaatgatatgcccaaatagacattctttatttttacaacaaatggtgatgaaataaaatccttcagaacgataattataatgttttaaacgaatcgatcttcgatgatgaatacctgcattatatttcgtagtcatacattccgctgtaattgtttttatagggcaaatgtaatttgcccctacaagcgatcaattttatgcaaccatttgcaaaactattgccaacactgcaggcaacaacccctgctttaccaatatccccttattcttcgtcgtaaccgccccaaaaactgcggcgataatcacacaacctaaaaagaaataaatcaccgaaatttggttgatggcataaccaaaaataatccctgctgccaaaaagccgttgtataacccttgattggcgaacaccacttttgctttcaatggtgaacatttctaaatagagaatgtagaaatgttcaagggtgacaagtgcagttaaaatataggctaaaatttccactagagcagccttgccgcggctttatccaaataccactccgtcaccccattttttgctttaatttttgctgcagggtaaggcaagtttttagctggtgtcgtttggatttcttttaaaatatctgctttgctttcgccagtgactaaataggtaatacgtttggcttgttcaatgagtttggctgttttagaaatgcggatttgaccgctttcagggtgcttagcaatgacagctaggttttcatcatcaaaattagtttgatgtgggaagagagaggcggtatgaccatcaatccccatgcctaaaataatccaatcaaaaacaccgtttggaatgaccgcacttaattcttcttcgaagcgttttagttcaaagtgcggttcattttcaccacgaattcgatggatattttccgttggaatttgaatatgatcgaataagagtttctgcacttcgccataattgctttcaggatcagatggcggaaccatacgatcatctccccaccaaaaatgcagatttttccagttaatttgttcagcataaggtgatttagctagggttttaaataataacttaggcgttgaaccaccagaaagggaaatatgtacaggatgatttaattgactataaatcacaaattcttgtgcaattttatcgactgcatgttgagcagttgggaagctgatatagttcattgattttccgttggactttagcccacaatttattatgttagtaagagcggtgggctaaagcccaccctacattagattagttaaacttttttcttcatcaatccacttggtttacgccacactttgccttgttttgcgattaatttatcagctgcaacaggcccccaagtgccagcttcatattcgtgaatacgaccaccattggctttgtaatctaaaatcggttgcacaaatttccatgcagcatgcacagcatcagtacgagcaaacaaggttgcatcgcctttcatcgcatccaacaataaacgttcataagcggttaatacttgcgtgcctgctaaatctgcataacggaaatccattgatacttctttcgcctcaaaacctgcacctggttttttcaaaccaaaacgcattgaaatcgcttcatcaggttgaatacgaataatcaatttattctctggtgcattttggctgaatacaggatgtggcgtggttttaaaatggatcacaatttcagtcacacgagctggtaagcgtttacccgtacgaacatagaacggcacgccagcccaacgccagttttcaatttcacaacgcaatgagatgtaggtttcagtacgagaatctgcaggcacacctttttcttctagatagcctttttccattttgccgttaatttcagccgcagtgtattgacccaaaacaaggttattctccatatcctccgaagttaatggacgcaaactatgcatcacttttgccacttcatcacgcattgaattcgcgttaataatcgctggcggctccattgcaaccatagcaaggacttgtaataaatggttttggaacatatctcgcattgcgccagaaccatcataatagcccccgcgctcttccacgccaatagattctgcaccagtaatttctacataatcaatgaaattacggttccaaagcggttcaaaccaaccatttgaaaaacgtaatacgagcaagttttgaacggtttctttacctaaataatggtcgatacgataaatttggtgttcttcaaagaaacggtggatttgtacgtctaatgcttgcgctgttttttcatcgtaaccaaaaggtttttcaacgataatacgtttccagccatattcttccgtatttaaaccatgtgcagccaaacactcaggaatcacgccataaagacttggcggagtggacatatagtaaagggtattaccacaggtttgatatttatcgtgaagttcgtctaaacgtggaacaagtttgccgtaatcttgagcatccgaagtattcactgcttggtaataaagatgagagcagaaagcatctaaagtgtcaggtgttgtttcttcattatgaattaacgcctcacgcattttttcgcggaaagtttcatcgttcaagtcagaacgtgcaacaccaagaacggaaaaattttcactcaaacgcccgattttgtagagattataaagggctggaatgagtttacgatgagttaagtcaccagacgcgccaaaaatgacgatacaattattatcagtttgcataattattccttattcggcttccgagtaatgtcgaaaataatgccgtattctagagaaaaaaaccaatcgaaccaatcaattaaattgaaagacagaacgccaatcgaacgattgatcgcccaccataacaaaatgcggattaatcaatgtttcgcgttggttataggttaaaggctcaaaatgagagtcaaaaatggcaccgtgagtttcactcagcaacacttctgcgccagcggtatcccattcgcctgtttgtcctaaacgaacataacaatctactgcaccttcagccaccaaaccgctttttaagctacttgaaccaaccacaacaaattcacaaggaaaatccttcggcaaaatcgaccgcactttttcttgtgaagtggttgcacctaccgcaattcgtaaagggcggtcaaaatttgtcgtgtttttagtgagtttttttacctgatccagttgttttttaaatgcgccgaaattatccattgcataataagttgtcgataaaattggtgcatgaataacacttaacacgggtttatttttacgaactaaggttatcaacacagaaaattgatcggtacgattaataaattgttgtgtgccatcaagaggatcaatcaaccaatattctttccaatttttacgctcttcaaaggaaatatggcaattttcttccgaaagaacagggacattagggaaaagtgcggtcaatttttcggttaaaaattggctcacaaaaagatccgcttccgtcactggcgtgttgtcttctttcaattcaacatgaacctgtttttgataaaactgttgcaaatgcttacccgcttggtaagcaatcagcaatacttggttaagtaaatgttcgtttagcgccagcataaaattattctcttgtttttggcagcaaccaaggcattacaaatagagcataaaaaaccattccgcatgtgcttattaacccgagggacaatcccccttcggtcaaccagccccaaaaggaagtttcttgttcaccgagcaataacaaataaaaataagatgccatattgcagtaaacaaatgaaatgatcgatgaaactaatacaatcgaagcaatgttataacgtgcgtaacggaattttgcggctaaaagtgcggttaaaaatgcgggaatggtggcaagaagaaatgctgtgagagcataactagaaaaaggaacgataacgccacttgagtcatcatcgaaccaaatcaaaagtgcggtgacgaccatctgtaaaatcagagggaaaaaaataagtatttttaagtaagatttcatagtgaaaaataggttatccagaagataacctattctaaaataaatttaaggattaatcagattttttcgcacgtaatacgcgagatgcaaaaatcacaatgcccacgataaatacgattaaacctaaccactcgccaattgtatcccagttttcaagatttaaggataatggtgcttcagaaccgccagtggtaacagaagccgcaataatgaatgctaaaattacccccattaaactttcgcctacaattaaacctgcagagaaaagcgtaccgaaacgttctgctttagctgacacttctttgttaccaagttttgcaatatggcgagccataatccacgctaggaatgcaccaacaatcacaggtgtattaattgatggtggtaagtaaataccaatccccacagcaataactggcaagctaaagactttgttgctgacttttttcaaaaatgcatcaatcgtaattaacacagcacctaaacccacaccagttaagatgtaagtccattccaatttatttgtgaaaataccttgagaaatggcggtcattaacgttgcttgtggtgcagataaggcttgtgaaggatccatatctgggcgtggcaacgcaccgctgaaaccatacgcgtgatacaagatttctaacactgccgcgataacaagtgcaccgacaaagcagccgataattaatgcaacttgttgtcgccaaggtgttgcttcaactaataaacccgtttttaaatcttgtagattatcattagaaatacaagctgtagtgattacgatagatgccgtaaacaatgtaagtgcggttaaaaatttctgaccatctacagtttcaaataagcccgaggcgttaccgattgacaccaatactaatgaaatcacgataacagaaataattccgataccagaaattgggcttgaagatgaacccactaaacctgccatataaccagaagctgctgccacaaagaagccgataaataccgctaagaaagtacaaactaccactaataaaatggaaagctcaggcgaaattggtgccgccgcaataaagtgatgtaatgaaataacaattaacgcaaccgtcgcaattaagatataaatcattgtttttggagaaaggtcaatatcaatacgatgttctgatgcctcttgcccacctttcagcatacggaaagaatgaaccatcccttcaatcattggtttcattaaaatcagcaatgtccaaatcgcagcaatgccaattgtacccacaccaatataacgcactttggttttccaaacagtcatcgcagaatcaattaaacttgcatccgcggcaatatcttctgacattgtgaaatatggcactgccacaccccaagtcaaaataacaccgatcaacattgcgataccgcccacaataccaattaaataaccagcaccaagcaaggcaagtgaaaagcccattggtaattggaacgccgcttttcctgtttgaatccaagcacttgcaccatcagccataacgcgtaaaccattagttaaaaatgcaactaatcctgctaaaacaccaccgtaagcaatatctttcacgccgctatcgccatctgcattattacctgctttcaaaatttctgcagcggctaccccttcaggataaggtaaattactatttaccaccattgcacggcgtaatggaatagtgaataacacgcccaatgtaccaccagcagcacaaatcaacatcgtttgccagaatggaaaatcttgccagtagcccatcattaataaaccaggcaagacgaagatcacagaagaaagcgtacctgctgaagatgcttgagtttgcaccatattattttcaagaatgctagaatctttgaaaaatttgagtactgccatagaaatgacggccgctggaatggatgacgcaaatgtcacccccacttttagaccgagatacacattggatgcagtgaaaattaccgtaatcaatgcaccgagaataattcctcgaacggtcaattcttttaagttttcgttatgcataaattgttccttgagcttaaaaaaagaaaaccgctcaaccttgtcaaaaatttgactatttttcaagtttttttaacataaaatttgttttattgaaaaatgtttaaattaacctgtttttattttttttcatttaataaaaatcctattaaagaataaaatttttaataacagttcattagcatactttgtggtactattttgtcgaatcaaaataaggagaaaataatggcagaaaaagaagtcagattagataaatggttgtgggctgcccgattttacaaaacacggagcattgctaaagcgatgattgaaagtggtaaagtgcattacaacaatcaacgtgcgaaagtaagtaaaattgtggaagtgggcgcaatgttaaaacttcgccagggaaacgaagaaaaagaaataaaaattatcgccttaagcgatcaacgccgaggtgcgccagaagcacaattactctatcaagaaaccgaaagtagcgtgaaaaaaagagaagaaatcgcgtgggcaagaaaaaataattccctttcaatgccccatcctgatcgtcgcccaaataaaaaagagcggagagatttattgaaatttaaacaccaagataaatttgaataaaaatttcaccgcactttctatgttcttaaggtttaatatctcgcaaaattggattttgcattgaaatcaaggtttcagtggattgaatttcatcaattaactgaatcttggtcgccaaaacggaatgtaattctgcaattgtgtgtgtcatcacctttaagaaaatcgagtaattgcccgttgtataataggcctcgactacttcatcaaaactttctagctttttgatcactttttcataatcttttgcactttttagaataatgccgataaaacaacatacatcatagcctaatttacgttcatcaataattacttttgtgcctttaataatgcccgattgacgcattttttcgacccgaacgtgaatcgttcctggactaacaccaaaatttttagccatttctgcgtatggtgttctcgcatctttagtgagtacacgtaatattttttgatctaaactatcaatgttgtgcataaaacttcctcctttagattttatttaattttttcacaatgaattagatgatatttaaccaagaaaagaaagtaaataaaatacttgaaataaaatcattatttactgaataatactcaaaaatattactcctcgttaaaaaaggttatcaaaatgaaaaagacatttattttacaacaacaagaaatcagctttgtgaagaacacttttacccaaaatcttattgagcaacttggcattattgaagtgcaaggcccaattttgagccaagtgggtaacggaatgcaagataacctatcaggcattgaaaaagccgtacaggttaatgtgaaatgtattccaaatgccgtatttgaagttgtgcattctcttgcgaaatggaaacgccatacattagctcgtttcaactttaaagaagacgaaggcttgtttgttcatatgaaagcattgcgtcccgatgaagattctcttgatcccacgcactctgtttatgtagatcaatgggactgggaaaaagtgattcctgaaggtcgtcgtaattttgcatacttaaaagaaacagtaaattctatttatcgtgctattcgtttaacagaattagccgtagaagcacgttttgatattccttccattcttccaaaacagattacctttgtgcatagcgaagatttagtaaaacgctatccagatttaagcagtaaagagcgtgaaaacgcaatttgtaaagaatacggtgcagtattcttaatcgggattggcggcaaactttcagatggcaaacctcatgatggtcgtgcaccagattatgatgactggacaacagaatctgaaaatggctacaaaggtttaaacggcgacattttggtatggaacgaccaattaggcaaagcctttgaactttcctcaatgggtatccgcgtagatgaaagtgcattacgcttacaagttggcttaacaggcgatgaagaccatttaaaaatggattggcaccaagatttattaaacgggaaattgccattaactatcggcggtggtatcggtcaatctcgcttagcgatgcttttacttcgtaaaaaacatatcggtgaagtgcaatcaagcgtatggccaaaagaaatgttagaagaattttcaaacattctttaaaatcaattaagtagataacaaaagtgcggtaaaaattaaccgcactttttattagatggaaaacttaaagaatacttaatagctgggcaaaatcatcaaacacccaatctggattggattcagtgatagggatattgtaattgtagccgtaagttaaaccaacaactgcacagcctgcagcgtggcctgcgataatatcatttttagaatcgcctacgaaaagcacttggcgtggttcaaaaccaaattttccgcataaataataaagcggacctggatgtggtttaatgacaggtaaagactggccacctaacatttcactaaataaatgatcaatgccaaatgctgccaacacaggttgaacatgttttgtgggtttattggtaacaactgctaggacatagcctttttctttcaggatttctaaagtttcttttacatttggatacaagcggctgacattacataaattctcgccataataaaaattaaaacgttctgttacttgcttaacctctgtttcagttagcacttttcctgtttgttttttcgcccaatctaacgctcgagcaattaatacaggtgcaccattgccgatccaagttaaaactaattcttctggcgcttgcggtaaattaaattcagccaaggcagaatttacggataacgctaaatcaggcaagctatttaccaaggtgccgtctaaatcaaagccaataagtttaaattgtgtgttcattgtttttctctgttctattgcaatcacatttcattaaaatgatagttatttgcccacactcgcaagttgtgtacgcatttggtcaataacttgtttataatctggcttaccaaaaattgcagaacctgccacaaacatatcagcacctgccgcggcaatttctgcgatgttatcaaccttcactccaccatctacttcaagacgaatgtcataaccactttcatcaatgatcttacgagcctgttgtaatttcttcaatgttgctggaataaaagattgtccgccaaatccgggattcactgacattaataaaaccacatccactttatctaaaacgtaatctaaatagctcaacggcgtcgcagggttaaaaactaatccagatttacaaccacaatcgcgaataagctgcaaagagcggtcaatatgttcgctagattctgggtgaaaagtgatgtagttcgcacctgctttagcaaaatcgggaataatacgatcaacgggttttaccattaaatgcacatcaatcggtgcggtaatgccataatcacgtaaagcttgacatactgcaggcccaaaagtgagattaggtacataatgattatccataacatcaaaatgaataacatccgcgcctgcattaagtacgttttgtacgtcatcgccaagacgtgcaagatcggcagaaagaattgatggggcgataagataaggtttcataaaggttctccgttgagaaaatgagtgcatttagtttactcacttaacgtcaaaaaaccaatagtaatccttatatgaaataacaagataaacaaagaaagggcactttggtgccctttcagtcatgaatataaatagacgaaatttacacgtctaaatttgctcttaacgcattcagctcaatgaactcacgacgtggctcaacttcatctcccattaaggtagtgaataattgatctgctgcaacagcatccttaatagaaactttcaacatacgacgtgaatttggatccattgtggtttcccaaagttgatctgcattcatttccccaagtcctttataacgttgtacttcaaggcctttacgagattcttttactagccattcaacggcttgttcaaaactacgcactggttgtactttttcgccacgaataacataagcaccctcttctaataaaccattgagttgtttattaagagaaacaattttcgcgtattcattgccgtgaacaaaatcaaaattcaagaaataatcggtatcaataccgtgtttgcgaacagtaatcaccgcttcatacacttggcgttccgcattaaattgtgtacgtactgaatattgatgtgcttctgtttcttttgcagtcagttgttcaacaaaagatttaccccaattttcaaccgcactttcctctttcatcatttcaatagaaattggcgactgataaattaatccttgcaatacaggggctgggtaatgacggcttaagcgaccgataagtttttgtacgctgttatattctgccaccaatttctcaaatacaagggcattcattgctggtgcatttgcgctgatatgtaattctgcgccatctaacgcaagggttaattcatattgctccatttcatccgcatctttaatgtagcgttcttgttttccttttttcactttgtaaagtggcggctgagcaatgtaaacataaccacgctcaatcagctcaggcatttgacgatagaaaaacgttaaaagcaacgtacggatgtgagaaccatccacatcagcatcggtcataataatgatatgatgataacgtaatttatctggattatattcatcacgaccaataccgcagcctaaagcagtaattaatgtgcccacttcttgggaagacaacattttgtcgaaacgtgctttttctacgtttaaaattttacctttcaatggcaaaattgcttgagttttacgatcacgaccaacttttgcagaaccaccagcggagtctccctccaccaagtaaagttcagaaagtgcaggatctttttcttggcagtctgcaagtttacccggtaaacctgcaatatctaatgcccctttacgacgcgtcatttcacgcgctttgcgtgctgcttcacgcgcacgagctgccataataatttgatttacaatgatttttgcatctgcaggattttctaataaatattcctgcattttttcattcatcgctgattccaccgcacttttaacttctgaagacacgagtttgtctttcgtttgcgatgagaattttggatcaggcactttaacggaaataatcgccaccaaaccttcacgtgcatcatcgcctgaagtcgccactttttcttttttcagcatgccttcgttttccatatagctatttaagctacgggttaaagctccacgaaaaccagctaagtgagtaccgccatcacgttgaggaatgttattggtaaagcagtacacgttttcatttacaccatcattccattgtaatgcgacttctacgccgatgccatctttctcagcggtaaaataaaatggttttggatgaattgggtttttatttttgttcaaatattctacgaatgcttgaataccgccttcgtaatggaaatgatcttcagatccatcacgtttatcgattaaacgaatagatacgccagaattcaagaaagaaagctcgcgtaagcgttttgctaagattttgtaatcaaaggttgtgatagcaaaaatatctgagcttggccagaaacgaaccgttgtccccgttgcctctgtttcgccaatcactgttaatggcgattgaggctcccctaaatgataaaactgctcgtgaacgtgaccttgacgacgaatggttaattgtaacttatcagaaagcgcattcactacagatacgcccacgccgtgtaaacctcctgatactttataagagttatcgtcaaatttaccacctgcgtgaagcacagtcataatcacttccgctgcagaaacgccttcttctgggtgaatatccacaggaataccacgcccatcatcttgcaccgatacagaattatcatcgtgaattgtcacgataatatcggaacaatggccagcgagggcttcatcaatggcattatccaccacttcaaataccatatggtgcaaaccagtaccgtcatcggtatcgccgatatacataccaggacgcttacgcaccgcatcaaggccttttaatactttaatgcttgatgcaccatagttatcattggtcgtttctgacataatttatctcattcttttgtaaataaaaattgggcgagattatagcaaaaaatcgccgttttggcgatgcttttcgggaaaggaaaacgataaaaaaagggcgaataatttcgccccataacttgttattttttccaattttttagcgcatcagcaaaggcattgcccatcgcattattacctcttgaactacgctcttctcgctgcgtatttgcacgaggtcttgctgataaagtgcggtcagatttactgtcatttttgaccgcactttcatctaatcgcatcgtcaatgcaatgcgtttacgtggcacatccacttctaacactttgacttttacaatgttgcctgtttttaccacttgatggggatcttccacgaatttatcgcttaatgatgaaatatgtactaaaccatcttgatgaacaccaatatccacaaatgcgccaaaattagttacattagtcactgttccttctaaaatcattccagattttaaatccgttatttcttccacgccctcagcaaatacagcggttttgaactcgccacgcggatcgcgccctggtttttctaactctttgaaaatatcttggacggtcggtaaaccaaattgttcatcaatgaattgttttgcatcaagctgacgtaccacacctgcattacccattaaatcttgaatagattgtgcggtagcttgcaaaattttttcgaccacagggtaagcttctgggtgaacacctgaagcatcaagtggatttttcccttcagcaatacgcataaagcctgcacattgctcaaaggctttaggccctaaacgtgacacttttttcaattctgcacggctttcaaaacgcccattttcatcacgatattccacaatgttttgtgctaaggttttcgtcattccagccacgcgagcgagcaatggtgcggatgccgtattcaaatccacacctactgcgtttacacagtcttccactactgcatcaagtttacgcgcaagttgagtttggtttacatcgtgttgatattgcccaacaccaatggatttcggttctattttcactaattctgccaatggatcttgtaaacgacgcgcaattgataccgcaccacgtaaagatacatctaaattcgggaattcatttgcggcaaattcagaagctgaataaacggacgcaccagcttcactgaccacaacggtttgtggtttattttctttaatttctttaatcacgtctttcgcaaaacgttctgtttcacgagaagctgtaccattaccaatagcaattaattccacgttatgtttgcggattaagctgaaaatcgccacttgtgcttcggcttcacgccccgtgtgtggataaatggtagtggtatctaataatttacctgtgttatccactactgcaactttaactcccgtacgtaagcctgggtccaagcccattgtgctcttcgcgccagccggtgctgccattaaaagtgcggtcaaatttctggcgaaaacatcaatggcttcttcttccgctttttcacgtaaacttgccattaattccgtttctaaatgcaacgaaactttgattttccacgtccacgcaatcacttgctcacgccatttatccgctggcagccccgtgaaacggacatctaaataatcacgaataatctcttcacaatagctttggctacttccctcttctgcatcaggatcagcatttaaacttaattgtaaaatgccctcattacgtccacggaacatggccaatgcccggtgagaaggcacatttttcaataattcttggtggtcgaaataatcttggaattttgagccttccgtttctttgccttcgatcacttttgatacgataacggcattttttgctaaataatcacgcactttcgctaataaacctgcatcttcagcaaaacgctccattaaaatatagcgagcaccatctaacgcagctttgctatcagctacgcctttttcagcatccacaaaggaaagtgcggttgattctggatcattttttggctcgctccaaagtaaatcagccaatggctcaagaccagcttcaatggcaatttgacctttggtacggcgttttggtttgtacggcaaatacaaatcctctaattcagttttgctttgtgtcgcatgaattttgtcacgcaattcatcggtcaattttccttgctcttcaatagatttcaaaatagtttgacgacgatcttccaattcacgcaaataaattaaacgggtttcaaaatgacgaagttgggtgtcatctaagccccctgtggcttctttacgataacgggcgataaatggaatggtgttgccatcatctaataattgaatggcagcaagaatttgttggggttgaacggttaattctgccgcaataatttggctaatttgttgatttaacattgtcgtacttctttattataaaaaaacgaagatagaatactggttttagcgggctggctcaaatataattcaaaaaactttcttttattttattatggcaaaatcaaattatattacccgtcaaggctggcttgcgcttgaccaagaactcaagtttttatggaaagaagaacgcccaaaagtcactcaagccgtttcagatgcagctgcactaggcgatcgtagcgaaaatgccgaatatatttatggtaaacgccgcttacgtgaaattgatcgccgcgtgcgttttttaactaaaagattggaagtgctacaaattgtcgattacaacccaaagcaagagggaaaagttttcttcggtgcgtgggtggaattagaaaatgaagaaggtgaaattaagcaatatcgtatcgtcggttgcgatgaatttgcccctgcgaaaaattggatatccattgattccccagttgctcgagctttaatcggaaaaacattagacgacgaagtgcgggtagaaacgccatcaggttttatcacactttatgtgaataaaatttggtatgagaataactcggaaaaataaaagatggtgaatatctaagcacaaagagaaaactaataggctagatataaactatcttacttgcctctttccttattcgctgcaaaatcagcaccttttgcaagcattctcaactgcaaaatcacacgagctttaagttgctcacgctcagctttactcatatctaaagcattcgcccctgcagtgaatacgattgttacgatgccttccgcttgaacataagcaacatattgcgaatattgatgtttgtaggaaatatattctgctaactcatcaacaaaatgcttaatttcgcgtgctgccgcagtacgaaaagcttgagaagtgcctgaactttcgcgtaatagcaagcgaaaaacgttcgtgctattagtaataaattcaaaaaatgtatccacagaaacagaaataacactaccgcccgcatcaatgcgtttacgcgcttgacgcattaattggcgcaacatcaaacctgcttcatccaccatttctaagccaagttcatccatatcactaaaatggcgatagaaagaggtaggcgcaataccagcctcgcgcgccacttctcgtaaacttaaattagaaaaacttttttctgcgctaagttgattaaatgccgcatccactaaagctcgacgcgtcttttctttttgaacagcacgaacaccagccattatttcaacccacctagaatagatttaacttcatcgctgaccgcacttgccacacgctcataacgattacgtaatggcgaaccaggacgataaaccaacgcaatggtgcgtgatggctcaggcgaataacaaggaatatatttcacacctttgcgcgtaccttcattcagtactgccaattcaggcataaaagtgataccagcattggctgccaccatattgcgcaaagtttcaagactagttgcttggaaatgggaattttcttttgcaccagcagtgaagcaataatctagcgcttggttgcgcaaacaatgaccatcatcaagcattaacatttcttgaccatctaattggttcattggaagtttactttcttgagcccaaggatgatgctctgatacggcgagtaacattttctcgttgaaaataggtacttcaataaaagcctcagtttctggaacagtggcaacgatagcacaatctaaacgccccgtttccaattgttctaataattgatgcgtttgcgcttcataaagaaacacttctaaatcagggaatgccgcttttaacattggcacaatataagggagcaaataaggaccaaccgttggaattaaaccgatgtgtaatggcccggtcatttctttaccttgattactcgccatttctttcaataattttacttctcgaagaactgtacgagcctgatcaaccaataacatcccagattgagtaaacaacactttacggctagtgcgctctaacaagataataccgagctcatcttctaatttacgaatttgaccacttaatgttggttgactcacattacaagaatcggcagcacggcggaaatgtttatattcagataaggcaacaagatattctagatcacggatattcatgagattttccctatagaaaaattcaattaaaagaatagaattaattgattatgactatatcataattttccctataatacagcacgtaaaatttaaattaacaaccaataggagaaaaaacaatgtctagtatggaaggaaaaaaagtccctcaagtgacattccgcactcgtcagggtgataaatgggttgatgtaactacctcagagttatttgataacaaaacagtgatcgtgttctcattaccgggcgcattcactccaacttgctcatcatcacacttaccacgttacaacgaattagcgccagtattcaaaaaatacggtgtagacgatattcttgttgtatctgtaaatgatactttcgtaatgaatgcatggaaagaagatgaaaaatctgaaaacatcactttcattccagatggtaatggtgaatttaccgaaggcatgggtatgttagttggtaaagaagatttaggcttcggtaaacgttcatggcgttattctatgcttgtgaaaaacggtgtagttgaaaaaatgtttatcgaaccaaacgaaccaggcgatccgttcaaagtatccgatgctgacactatgttgaaataccttgcaccacaacaccaagtgcaagagtctatttcaatcttcacaaaacctggctgtcctttctgtgcaaaagcaaaacaacttttacacgataaaggcttaagctttgaagaaatcatattaggtcacgatgcaacaatcgtgagcgtacgtgcagtttcaggtcgtactactgttccacaagtgtttatcggtggtaaacacattggcggtagcgacgatttggaaaaatactttgcataagcaggcaagtatttagctgattattattattattatttgagaatgtaatttaaagggcgcattaagcgcccttttcatttgtacgaatttattgcaaaaatcaataatggggcggtggcgtttcttcagattgacttgcaatgttagagggttgaaagtcttttaatttatttgccatataacgcaattggacttgcattttatcaatatcaaattgctgttgaactaaagcgtgatttaattcatctaataactgttcctgaaatgcaattttcatttcaagttcttcgatgcgattttctaacatttgttgaatttgcataaattttctctaaattctaaaaaaaagttgagaatagatagaaagccatttaatctattcctcgtattattccattcattataaaggattaactcatatgttaaaaattcaaaaattatctattgcagcattaatggtaagtgcggtgatttctggccaagtttttgcagaagatagcgcattcgatgaaaaagcggcatcttatgcagtaggtgcgttaatgggcagtcaaatgaaagatcttgttgattcccacaaagaagttattaaatatgataatgcgcgtattttagatggcttaaaagatgctttagaaggcaaagtggatgttcgtaaagatgaaaaaatccaaaaaaccttagaatctattgaagcaaaattagtggctgcatcaaaagcaaaagcagaatcgattgctaaacaagcaaaagaagaaggcgataaattccgtgctgaatttgccaaagggaaagatgtaaaaacgacgcaatctggtttaatgtataaaattgaaagtgcaggtaaaggcgatacaatcaaatcaacggatacggttaaagtacattacacgggtaaattaccaaatggaaaagtatttgatagctctgtcgagcgcggacaacctgtagaattccaacttgatcaagtgattaaaggctggactgaaggtcttcaattagtgaaaaaaggcggaaaaattcaattagtcatagccccagaattaggctatggcgaacaaggtgctggtgcatctattccaccaaattcaacattaatttttgatgtggaagtattagacgtcaatccgaaatctgaaaaataacggataagtttaatagcgcgcgttctttaacgcgtgctttttattataaaaacgagcggaatttttaccgcacttttaacctaacgctatgacattaaacgataaatatcctttcactgatgaagatcaggctatcataaattcctacaaagcagtcgttgatggtgtcagcgcactgattggcgagcactgcgaaatcgtgcttcattctctggaaaatattgaacattctgctatttgtattgccaacggacataacactaatcgacaagttggttcgccaattactgatcttgccttacgttcgctccgaaatatgcaaagcgaaagtgtttcaaagccttattttacacgagcaaaaggcagcgtactgatgaaatcagttactatcgctattcgtaataaaactcaacgtattattggtttgctttgcatcaatatcaatttagatgtacccatgtctcaatttttgcaatgctttatgccaactgagcatacgaatgaaacatcttcagtgaactttgcgaattcagtggaagacttggttgcgcagactattgaaaaaacaatagaagaagtcaatgcggatcgctctgttgccaataatactaaaaaccgacaaattgtcctttctctttacgaaaaaggtatttttgatattaaagatgcgattaatttagtcgcagaacgcttagatatttcccgacatacggtttacctgtacatccgccaaatcaaacaagagcaagaataatgcgctatgttatcgccgtcaaaagccctatttacggaaaacaaggggcatttttagcttatcaatttgcagatgccttaatcaaaaaaggacacgaaatctcacagatttttttcttccaagatggagtgagtaacggaaatgcattagtgtatccagccaatgatgaagttaatttacaaaaacattggcaaatgttttctattacctacaatattcctttacatttatgtgttgcagcatctcaaagacgaggtgttgttgataacttaactacaccaactacagctcactacaatcttgcagagggattcacaattgcaggtcttggagaatttatagcagcaagtttaaacgcagatcgagtaataaccctatgaagatagcctttttatttcgcacatctccacatggcacatccatttcacgagaaggcttagatgcaattcttgccgcgacagctttttgtgaacccaatgatattgggatattttttatcgatgatggcgtattaaatcttatcgataaccaacaacccgaaatcattcaacaaaaagatttcattagaacctttaaattattagatttatatgatgtagaacaacgctttatctgcacagcgtctttgcagaaatttaaattagataatagagaacttatcctatcttgtgaaaaaattgaccgctctttattgctagaaaagcttaatcaagcagaaaaattgtttactttctaaggaatattatgctttatacattttctcaatcagattatcccaaaactgaactcgatgactatttttcatatattacagaaaaagatgcggtagtactatggcaagacggtgtgttattggcaataaaatatcctgattattttgccaaatgtaaagggaattgcatgatattaaaacaagatattttagcaagaaatctcaccgcacttttacctcaaagcagcaagataaaattaatatcaatagaagaacttgttggaatcactgaaaattatttaccacagctatcactataaaaatcaaataatttagtaaatactcaagcaaagtatcagatatagaataaaaaaatgcggagaattttctccgcacttttctttttacttcttctgtcttttatctttaagacattcaagaattcatcaattatttgatgattttcgcaacaacgcctgcacctactgtacggccaccttcacggattgcgaaacgtaaaccttgatccatcgcgattgggtggattaagcttactgtcatcttgatgttatcccctggcattaccatttccacgccttctggtaattcaatagtaccagtcacgtctgttgtacggaaatagaattgtggacggtaacctttgaagaatggagtatgacgaccaccttcatcttttgataatacgtacacttctgattcgaagtcagtgtgtggtgtgattgaacctggtttcgctaatacttgaccacgttcgatttcttcacgtttggttccacgtaataatgcaccgatgttttcacctgcacgaccttcgtcaagtaatttacggaacatttcaacaccagttacagtagttttcgctgtatctttgataccgacgatttctacttcatcacctgtacggatgataccacgttctacacgacctgttactacagtaccacgacctgagattgagaatacatcttcgattggaagaaggaacggttggtcaatcgcacgttctggttctgggatgtaagtatctaaatggtttgctaactcaaggattttttcttcccattctgctacgccgtttaacgcttgtaatgctgaaccacgtacgattggtgtatcgtcacctgggaagtcatattgagatagaagttcacgaacttccatttctactaattctaataactcttcgtcatctaccatgtcgcatttgtttaagaatacgatgatgtatggaacacctacttggcgacctaataagatgtgctcacgagtttgtggcataggaccatctgttgctgctacgactaaaatagcaccatccatttgtgccgcaccagtaatcatatttttaacatagtcggcgtgtcccggacagtctacgtgtgcgtagtggcgagtcggtgtatcgtattcaacgtgtgaagtgttgatggtaataccacgcgctttttcttctggcgcgttatcaatttggtcaaatgcacgcgctgcaccaccgtagtgttttgctaatacggttgtgattgctgctgttaaagttgttttaccgtggtcaacgtggccgattgtacccacgtttacgtgcggttttgtacgttcaaatttttctttagacattgctaatgtttcctaagaagtgcggtataaaacaatcatattttacaccgctggtttacaaaaattattttttacgcgcttcaattactgcagctgccacacttgttggagcttcagcatattttaacggttccattgagtatgatgcacgaccttgagtttgtgaacgtaagtctgttgcataaccgaacatttctgaaagtggaacttcagcatcgatcttaacaacaaactcgttcgcttcttgaccgtttaccatagcacgacgacggcttaaatcaccaattacatcaccaacatattcaggtggagtttcaacttcaactttcataattggctcaagtaatactgggtttgcttttgagaatgctgctttaaatgctaaagacgcagcaagtttaaatgctaactcagatgaatccacatcatggtatgaaccgaagtgtaaacgtacaccaagatcaactactgggtaaccagctaatggaccagatttaagttgttcttgaatacctttatcaacggctggaatgtattcaccaggaattacaccacctttgatttcgtttacaaattcataaccaggaccttctggatctaatgggtataagtcgataagaacatgaccatattgaccgcgaccaccagattgtttagcgtgtttaccttcgacatcattaacacgagtgcggatagtttcacggtatgatacttgtggtttaccaatattagcttccactttgaactcacgtttcatacgatcaacaatgatatctaagtgcaactcacccataccagaaataatggtttcaccagattcctcatctgtgtgaacacggaatgaagggtcttcttgtgctaaacgacctaatgctaagcccattttttcttggtcagctttagtttttggttctaccgcaacagagattactggctctgggaattccatacgctcaaggataattggcgcatcaattgcacataatgtatcaccagtagttacatcttttaatccgatagcagctgcgatgtcacctgcacgaacttctttaatttcttcacgtttattagcgtgcatctgtacgatacgaccaaaacgttcacgtttttgacgtacagaattcaatactgtatctccagaattaatcactccagaatatacacggaagaatgttaagttacctacgaatgggtcagttgcaattttaaatgctaatgaagagaatggttcttcatcacttgcgtgacgctcaccttcagtttcatctggattgatacctttaatagcaggaatatcagttggtgctggtaggtattcaacaactgcatcaagcattgcttgaacacctttgtttttgaacgcagaaccacaggttaccaaaataatttcatttgctaatacacgctgacgtaatgctgacttaatttcttcttcagttaagtcttcgccacctaagtatttttccattaattcttctgacgcttcagctgccgcttcaacaagattttgacgccattcttcacagtctgcttgcatattagcaggcacttcttcataagtgaaagtcataccttggtctgcttcattccaattgatcgctttcattttgatcaaatcaactacacctgtgaagttttcttctgcaccaacaggaagttgaagaggaatagcattagcacctaagcgagtttttaattgttcaacaacacgtaagaagttagcaccagtacggtccattttgtttacgaacgcaatacgcggaacttcatatttgttagcttgacgccatacggtttcagattgtggttgaacaccaccaaccgcacagtaaaccattaccgcaccatcaagaacacgcatagaacgttctacttcaacagtaaagtccacgtgtcccggagtatcaataacattgatacgatgttgtgggaattgttgtgacataccagaccagaatgcagttgttgccgcagaggtaatggtgataccacgctcttgttcttgttccatccagtccatcgttgctgcaccatcgtgcacttcaccgattttgtggctaacaccagtatagaataagatacgctcagtagtagtagttttacccgcatcaatatgcgcactgataccgatattacgatatctttcaataggggttgtacgagccattattataaccttgtttatttaatatcagtttatataagggtaaggcttcatcaacgatgaagccctttaaattcaaaaacttattaccaacggtagtgagcaaatgctttattagcttcagccatacggtgaacatcttcacgttttttcactgctgcacctttattatctgaagcatcagataattcgtttgcaaggcgtaaagccattgatttatcaccacgtttacgtgctgcttcaacgatccaacgcatacctaatgcgttacgacgtacagggcgcacttcaactggtacttggtaagtagaaccaccaacacgacgagatttaacctcaacagttggacgtacgttttcaagtgcaacttcaaacgcttctaaaggctctttacctgtgcgttgtgctaaagtttctaaagcaccataaacgattgattcagcaacggattttttaccgtctaccatgattacattaataaattttgcaagtaattctgaaccgaacttcggatctggaagaatcttgcgtgcttcaacactacgacgacgtggcattgcgaatttctccgtattttaatcttcaggatatccaaaacccatcagcaatatttctcattgagaaaatttgcagcgcaaagcgctttttgactggagtttatggtttaaattgttttgctaatttagacgtttggccttacttaacggagaaccattaagctttaggacgtttaacgccgtatttagaacgaccttgtttacgatctttaacgcctgcgcagtctaatgcaccgcgtactgtgtggtaacgcacacctggtaagtctttaacacgaccaccacggattaatacaacactgtgctcttgaaggttgtgaccttcaccaccgatataagaagttacttcaaaaccgttagttaagcggatacgacatactttacgtaacgctgagtttggttttttaggagttgtagtatatacacgagtacatacaccacgtttctgcgggcaagcctctaatgcaggaacgttgctttttacaacctttttcacacgcggtttgcgtactagctggttgatagttgccattaaaaaagctccagtttaaatgttattcaagaatagaatgttgttcaaaaaatctacttctatatagaaatagacggcgaattctaatagttttacgctttattgtcaataattaaacaatataytctaggattaaaactagattaaaatttaccgcacttttgttttttaataaaaaattttattccccacgtttaagcatgccttgttttttcaaattaaccagaataattgaaatagcagcaggggtgatacctgaaattcggctcgcttgaccaatggaaaccggacgatgctgttccaatttcgcacgtacttcattagataaaccagacactttgctataatcaaagttagctgggatagccgtattttcgtggcgtttttgtttttcgatttcttcttgttgatgctcgatatagccttgatatttaatagctatttccacttgttctacggcttctctatcttccattgctggtttatatggcgttaaagaagtcaaaatatcgtaggtcatttcaggacgacgcaataaatcttcaccgctagcctcacgtacaagtggactaccaagcactttattcgcttcttctaaatattcagaacgcggatgcaaccaaatgttgcgtaagcgttggcgttcctgttcaatattttccattttttgattgaaacgtgcccagcgagcatcatcaatcaaacctagttcatgggcaattggtgttaaacgaatgtccgcattgtcttcacgtagtaacaaacggtattcagcacgagaagtaaatacgcgatacggttctttggtaccaagcgtgcaaaggtcatccaccaatacaccagtataagattgatcacggcgtggataccatgcatccttctcttgaacataaagacctgcgttaatcccagccaataaaccttgtgccgcagcttcttcataaccggttgtaccgttaatttgacctgcaaagaataaacccgaaatcgatttagtttctaacgttggttttaagtcacgtggatcaaaataatcatattcaatcgcataacctggtttaataatgcgcgctttttccaaacctttcatagaattcacaatgcccatttgcacgtcaaacggtaaactggtagagatcccgtttggatacacctcattactggttaagccttctggttctaaataaatttgatgtgaattacgatccgagaaacgcatcactttatcttcaatagatgggcaataacgcggaccgatcccttcaatcacaccagtatacattggactgcgatccaagttattacggatcacttcatgggtttgttcattggtatgggtgatatagcaaggaatttgttgggggtgatcatcaactgatcccataaaagaaaacacaggtaaaacagcatcaccatgttgtttagctaaaatatcaaaattgatcgtacgtgcatcaatacgtggtggtgtacctgttttaaggcgatctacacgtaatccaagatctcttaatcgatgtgaaagatttacagaagcaggatcccctgcacggccaccttcataattttccaaaccaatatgaattttaccagctaagaaagtacctgcagttaatatcactgatttagcacgaaaagttaatcccatttttgtgctaacgcctgtaactcgatcttgctcaatcagaatatcagtcgcttcttgttggaaaatatctaaattaggttgattttctaatgcagtacgaacagcttggcgatatagaactctgtcagcttgagcacgagttgcacgcactgctgggcctttactgctatttaaagtacgaaattggatccctgctttatctgcagcatgcgccattaaaccgcccattgcatctacttcttttactaaatgacctttaccgatcccaccaattgcagggttacaagacatttgccccaaagtatctacattatgtgttaataaaagggttttaaatcccatacgagctggtgcaagcgcggcttctgtacccgcatggccaccaccgatcacaatcacatcataagtttcagtgtaaaacatatctatctctatttattcggatcaaaaaattggcgttattctacagaaatttaaaacacctgacaaaaaaagaatggatctattgatcctttgaaagatcaggtttgtattagtaaataagatctctttttatatataaagatcttattattgttattattaagatcttttttggttgtgagtaaccttattagatccttacggaaacaggtgttataggatccaaaaatcttgtgaaaatgcgatcattttctttaaaaatcttgtgtgtaaaatggaaagttattaacaattttatttttgctcaaagttaccaagtgagtaaaaacagttttatgacagattatttatgagttatccacagataaaaatgaatttttattgaaatccctataatttagtttttttaaacaattaattttattaaatgtacgttttatgatttggctttgtagttactacaggttttatacttccttcaaatcaaatagttaaggaaataaaattaaagattttttacagtcaattgttactgaaagtgaacataatgaagaggaatgtaaagcaatagaaggattgaaaagcaaatgtaatttgtaaaaatattcaaaaatttgaccgcactttaggaagaaaaaatgccacctaaattttaatatttagatggcattttatttttctaattattatttagataaatcaatttgatacactgcaaaaccgatttcgtcagtacccacctgtttcatcggatattgtgctttttctgcgataaatttcgccgcttgttcgcttggcgatgtttcaaaacggacatctaatttatcgttacctgtgataggcacaaaacgccagtttttatccgcatttggattgactgaaccttctttctcactggttgctttaatataatcagccaaaatttgacggctttcatctggtgatgcgtaaacaatatgttgatcgccagtacctgggaatttattgccgtaagcacgatagttattcgttgcaatcaaaaattctgcttttggatcaactggtttaccttgataagtgagattcactacacgatgcgattctgggttgattaacttacattcgccatcgtaacgagcaggtttggttagatcgtattcataattgacaccatcaatcacatcaaagttataagtgcggaaaccttcccagtcgattaatgattgtggtttatcacttgtagggtcaatttgtttaaacataccagcactacattctaaccattcttttaattgctcgcctgtcgctttaacaaccactagcgtatttggataaaggtataagtctgctgcattacggaaagttaattcacctttatttacttcggtatagcctgttgggtcatttttacgaccacccgctttaaatggtgcgcctgcacttaaaataggtaagccagccattgctgcaacacttggtgcaactttctctacatacgctttttgtgcttggtttacaatttgaatggttggatcatcttgtactaatgcaagatagctgtacatattatctgttgctttgccgataggttgagaaacatatttacgtgtcgcttcgtgaactggttttaaaagtgcggtaatttctgggtcattttttgcaagtgcttttttggtttctacatcataaattggacgaagcacagctttgccagaagtcacgatccatttacccttgtgttctgttaagcctaaatccaccacgctgatattatttgcccagtaaccagccatactttctggtacgccttttacggtaccatttacgatgtctgcatttggtgatttcgcaaattctttatttgggaataaacggtgtgagtgaccaaaaataaccgcatcaatgtgtggaacatccgctagatagaatgctgagttttcagcaccttcttgataaggttcatcagatggaccagtgtgagctaatgcaacgacaatatcagccccttttttcttcatttcaggtacatatttttgtgctgtttttacaatatcacgggtttcaactttgccttgaaggttcgctttatcccaaaccataatttgcggtggcacaaaaccgatataaccgatttttaatttatgtgttttgccttgattatcaacaactgatttttcttgaatgacataaggtgtgaaataaggttcttctgttcccgcttttactacgttcgcattcacaattgggaatttagcttgtttgatggcatcagcaagataattgaggccatagttaaattcgtggttacctaatgtacccacttcataattcatcgcatttaaacaatcgaccgcagggttagatttgccttctttatagccttgtgcggcttgatagtctgcaattggattaccttgaattaaatccccattatctaccaatacgctattttttacttcagcacgtgcttgacgaataaggcttgccgcacgagtaaaaccgaatttatcggttggtgcatctttataatagtcaaaatcggtcaagaaactatgaacatctgttgttgccacaatgcgtagttcaacatcgctctttccttttgccatcgcaaaacggtttgcacttaatgcaagaatactggtcgcaccaatttgaataaaatgacgtctgttcatcatagagttttccttattagggtgagtaaatattccctttattctaagaaaaatagcggattcttaaaagaaaggagtaaaaatatttttatttaattaagctaataatttctgtactaaggaagtataaatattaaccccagtaagtaattgattttcatcaaaatcaaattcagcttcgtgatgacctgctgtgcgatctgcgccaagaatgaagtaaatagctttgcctccatgttcttgtacacgtctacctaaaatagtcgcatcttcacttgcattgaaagcataatctgaatttacgttatttatttgtggttgttcaagagatatttcttcgatgagttttataagttcaacatcgttattcatatccactgcttcacctacaatttcagtttcatatgcgacatcaaaacttatggagatacctttggctatttgcatgacttgttcagtcatgtattcattaattgctttattttctccccgcacttctaattgtaattcagcagaggatggaatgacatttcgtccttcacccgcttttagcacacccacattaattcttgtcatgccttcaccatggcgtgcgataccatgaagttgagtgactgtatgcgctgcagctaataaagcattacgacctaaatggggcgcagcacctgcgtgtgcaggtttacctttatagcgaatatcaatttttgtagtggaaagaaaatttcttggattagcaataactgtgcctgtatttgcgcaaaaactaatatgtgaagaagcaaaataatctacatcatcaattatgccactttgtgcaatggctgctgcacctcgaacaccttcttctgctggttggaatacaatttttacttttccagtgagtttatctttgttctgagcgatccataatgcaacacctaaacctattgtaatatgtgaatcatgtccacaagcatgcataaaaccatcgttaattgaggcaaaaccttctttatttggaatatgctcgggtgagcgagtttccgttacattcacacagtcgatatcaaaacgtaacgcgatggtttttcctggtttacctgaatcaaataatgccacacaaccagtgtacccttccattttttcgagccatttttcattggctccataggcttttgcattagctaaacctttatctactacggcttgttttcgtccacgaacaaagtccggatttataatttgtttgccaagaaaaattttaaaacaacctaagtcttccaagtaatccgcaatacgagaagttgtccaaaattcactccaaccaatttctgggaaacgatgaaattcacgacgccatttaacaagttgatttaaatctaaattcatttttttctcctttaaaagtctataaaaacagaccgcacttaaataaagtgcggtcaattttttactatttttacaacataaataatgctaagaataaaactgcaagtatcatgcctggtgcggtgcgttttaccatttctactgggcttaccatcgcaagtcctgcacaaacaatagttacgcctgcaattggtgaagcagtacgaccaattgcaccagcaattgctgctgccataccaagatttacgtgagtgtagccgagttctacagcatgtggtgtgacagcagtgttaaaggcaatcgctgctgcatcgccagagcctgtaattaaacccattaagaatggtccaattgttgcaccccaacgtacaaattcgttggattcttttaagaaagaaattgccgcatcaactgcgcccgtagattttaatcctgccacaaatacactggctgcaatgataataccaagtacgtttgcataagaatttcccataccattgaaaaattcttcagtaatttttactggagaaatacgagtgacgataatgccgtaaattgcaccaatcagcatcgcttgaggaacgcccattttagtccattcaagacccggtacttgttgtaatgatgttccaccaatcactaaaataactaatggtattaatggtgcaagggcataaagtacattgacaccttcaacaactttaatttcattttctttttgttctgcaagataagcttggcgatgttgttcaccataatctttaaaaacaagcgcaagaattgttaaaacaacagcacctattgctcccgcaatcatgttatatggcgcatgtgaaaggtttacttgagtgatagttaagcctgacatttcactaatcattgctgagtgagaagaacctgggctcatcattgatccaaaagttcctgctaaaatagctgcaccagcagtagctggtcgaacacccgcactttttaaaacaggaattaatgttgcaccaaccgcagctgcacaaccagcagcagaaggaatagcaatattgatgaaaaaggtgatgactgttgcaatcggaattaagaagaattttaatccgcttaatggtttggtaagtaaatgcactagatgagtgtcacattgagtgtatttcattacataagcaaaacccatactagaacagatggccataattaatccgccagatgtcatgcttttggcaaaagcatctaatgcacccattggattcagcgtcagaatggacattattaaaccgacaccaatcaaaactgttcgggtttcggcttttttaatcagaaaataaattgtggcaataatgccaatcactgcaacgatggatttgaataattccattatatgttccttttaagttaataagaaaaagttgtattgatatcaaatgtgccacattccatattttcactgaagcacaaaataggattttcacccaacacagttgccatttcattttgtatatgaagtgcagaaccttcaggcaatgcatatacaagtgcggttggattaacgagtaaaaattcggctaaacgttcttctcggctttcaccattgtggccttgcattttacctgaaataaagtgcggattaatttgatgaggaaaaagttgtaatgcttgaaatgaaggaggataagtaatcggcatatcattcgttgtcataatggatgcacccgctacatttgccccagcactccaaccaaaataaggcgtaccgttattcactttttcacgaatgatatcaattaaattgtgttcataaagctgttttaacaaacaaaatgtattcccgccgccaatagcaatgacatctgcttgttcaataatatctcgatgctgtttaccatgatgaacggaaacaatattcatctctaaataagaaagtgcattttgcacagttttttcatattcatcaaaagtgcggagtaccccagcataaggcacaaaagcaattgttttaccacgataatcagccaagaaattttgtaaccaaggtagagtgtgttcaagataacctgtgttcttgtattttgagctactgagcagtaacatgtttttcattttctactcctttttataggtatttagaaataccgatattacgcttagaaaaggttaattttcaacgaaaaattattattgtttgacgaatatcaaaaaataaatcatatcaggagaaaactatgtcaattaatcttaatcgtgttcaaaatttaattgaaaaactggcttttatttcatgttatatcagtgaaaaagagatcatccgtgagattttaatctttatgttgaccgcactttcctttgttatggttaaacgttacacccgaaaactcggccaacaaacagaatttcagcctattttgttaagagtattatcctaaataaaaagagcggttgaaaacaattaaattttcaaccgctcttttgtacttagcttattactactcgaaagagcctacattaagatgtaggcttctctttttttaattagcttgtgattttttaaggtcaaatttgtaagaaacaaaaccatacaatgtccaaccgataaaggtcacaattgaaccatataacatcgcttgttcaccggctgcataaagtgcatagatactataaagtgaaccaataaaggcaacaaaaacggttgttttatatttttgtggcgtaacattctctgctttcaataacactgcaagtgcagccattgagagcaagtatggaataacgtttgttactaccgctaagtctaccaacacattgaattgtttatttaatgatgggctgattgtcattaaagagagtaaagtttgtaacgcagtaatggtaatcataccaacaacaggcgcatctttactggtaacttttttgaagaatgctgggaaataaccttcttctgctgaagatttgaatacttgagcaatagtgaactgccagcctaataatgaaccaaagcaagacatcaccattaagaccatgataactttaccgacaatttcatcaaacatatgagcaaaggctaaaccgaatggtgctgttgaattagcgagttcaaggttaggtacaatacctgcaatcacgttagttgaaacaatataaattaccgctgcccctaaagtaccaccaagtactgcgattggtacgtttttctctggattttcaactgcatctgcgttagcgcaagctgattctaaccctaagaacgcccataatgtcattgaaatagatacaccgatcgcttcaaaagttggtacattatgtgggttccaagagtttacatacattgaaccatcaaaccatttccaaccaatgatagaaataccaactacagggataattacgccccagatagtaaatgaacttatattaccggtgattcttgcaccaccaaagttaagaacggttgcaagccaaagggtgaagatggtccataatgcgatagaaagtggagaaagggttgcaccgagaagctctgaaccataacccaccgcagaaatcgcgattgctgtattcgcaataactaatgatacaccgtaagtgtagttagccatgaagttaccggctttaccgaaagagtattccgcataaccgcccataccaccagattttttactgaacataccgcattgtgcgaatgcataagctaaggctgttgaaccaacggctgttacaagccaagaaacgatggaaatagtcccaatttcggctaatttggtcggtaacataatgataccggaacccatcatattaaccatggtaagaatggtgagttgtactacaccaattttattacttttagcgctcataatttatactcctacaagtgcggtcaaaaaatcagatgtttttaaccgcactttcttttgtttgtgctgagagggttatgaggaagatcctcacaacctcactttattaatagtcagttaaaacatagccatatgcacgagtacgtccatcagggtctttttgtaagtaaaccccttggatttcaggtgcgaaaccaggtaatgtgttgataccttcttctaatgcaaggaagtatttttgtgcagttggactccatctttctccaggcaccacacataacacacctggaggataaggtaatgcaccttccgcagccacacgaccaacaatatcagtcaatggaacgagttcaactttgttacgaacgaattcaatattcgcatcgtgtggatttaacgcatattccggtaatgttgctttacggaataggtctttttgaagttgttttacattgcggcttacataaaggtcatgcatttcttggcataattgacggatagtatagtctttgtaacggtcttcattgtttttatacacagttggcaatacatcttttaataaagagtcttgtttaatgtgtttttcaaacaaggcgatttgagcgaccaaagtttgcattttggtgagggtttctgccggagtgagcaagaataagattgagttcaagtcacatttttccggaataataccgttttcacgtaagtagttagcaagaatagttgctggtacaccaaatttttcatattcgcctgtttctaagctaatacctggtgtggtaagcaagaatttacaagggtcaacgaagtattgttcatcagcatagccttcaaatttatgccatgtatctgttgggtggaatttgaagaattcgagattagttgcgatttcttctgtgtcataatcttgccattttttacctttaattgtggttggaataaatggacgaattaattcacagtgatttaacactaatttacgcgcttcgatacctactttcacacattcatgccataagcgacgacccgcttcgctaccttgaatttttgcattcacatctaacgccgcaaataatggatagaacggactggttgacgcatgtaacataaaggcattattgaaacgtttgtggtttacataacgatcttgacctttaatgtgtttatcttttttgtgaatttgtgaagtttgtgagaaacctgcttgttgtttatgaacagattgagtcactaaaataccagggtcattttcatttaattcaagcaataatggagagcagtctttcatcattggaataaattgttcataacctacccatgcagagtcgaataagatgtagtcacaaagatgaccaattttatctaccacttgacgtgcgttataaattgtaccgtcataagtacctaattgaataacggctaaacggaatggacgtttttggtttaatttttcaggcgccacttctttaattaatgatttcaaataatcttcttcgaagcagtgactatcgataccaccaatgaaaccaaatggattacgtgcagtttctaagtaaattggggttgcacccgcttgaattaatgcaccatggtggtttgatttatggttattacggtcaaataatactaaatcgcccggagcaagtactgcgtttaatgcaactttgtttgaagaagatgtaccatttaatacgaagtaagttttatctgcattgaatacttgagcagcatatttttgtgcatcacaagctgcaccttcgtgaattaacaagtcacctaatttcacgtctgcattacaaatatctgaacggaaaatgttttcaccgtagaagtcataaaggaaacgacctgctgggtgtttacggtagtattgaccaccttgatgtcccggacagtcaaaagcaatattacccatttctacatattcacttaacattttgaagaatggaggtaacattttttcttcataaagtcttgcagcagtttcgatttgacggctataaagcttaatgtcataaccatttaaatcttgaatatgataaatagcatcatagaattccggatcaacttgttcttcttcagtttgaacaacaaatactgggataccaaaatttgttgtttgaatacgttcaaggtattcacctacatcccctgatgtcaacatgatagctgcaacatcagtaaagtctgttttggtaatttcaactaattctctatttgtagagaaatattgttcaacttttggattatatgcaatttttaagtttggcataataaactccttttatttatttttttgacgtaaagttaccctgcgctattaattttaataacgcaatagatttatttagaataaaacaactcgctctagttttttaatataaaaaactaaagtaagaatttttattttaaattaaataagattaagttaatttcacaaaatatttcttgcctgttctagacaatacaaaaatattcagaaattaatctatggagactctctaaacagagagaacaactctgtttagagagccgtgttggatggtttattttgagaagcgaatactgagtatgagaagcaagagcgatgcgatggcatcataatatggcgtgtacgacggatatgcgccatcaaagaacgaccttttatcggattaaaccataaaagtctcaatactttcgtatagacgtatctgtgtatatatgtacgaagtagcatagaaaaatttcctctttctatctaaactaaccttagttaggtatattctctgcttgtgtaaatatcatgtcaataatatttttcaaaaaatgtgatcattatcaaaaaataaatttaaatttcatataaaaaataaaaccacaaaaagtatggaaataaattattcttaaatttaggcgattaattaatgtaccaatttatctctttcctaagctaaacttgctaccatgactgcttttatcgtatgcatacggttttctgcttgttcaaatgcaatgttcattggcgattcaaatacatcttcagtagttgtagggtgggctttagcccaccaacaaacaatcgtgagatattttggtgggctgaacgcatcattctatgcgtgcttctttttattttaggagcaatcattatgatgattttataaaggcaattcagttgttgatttgaccgtttttagagtaacttctgattttaaggttttaatgccaagcctagaattaagataggtatttttgatgtaattaaattgatcaagatctgatacattgagttttaataagaaatcaaagctaccagccataaaatggcattcggtaatttgagggattagtttcacttcaaaaataaaccgctcttttaattctggatcttcttcaaagaaagaacctaatgcataaacgataagatgacaatttattttcttgggattcaataaggcaacataactatcaattacgctgcttttttccagttgatttactcggcgtaaacaagctgaatttgaaagccctatttcgttggcaagttcattattttgtaatcgaccattgcgttgcaatgctttaagaatacgggtatcgatattatcgaagcgttttttaagcatagtaaatcttttttatgctaacaaaaaagataacctagtataaaagaaaccgcctagaaaaactgtgatctaggcggcaatttgactaattaaacgctatataaggatacttgtactaccagtaaaatagatccgattagtaataaacatccaatcataggcatcacgaatttaacccatctatcaaatggaatatgcaacatttggagtgtcaccaatactaatcctgttggtgctaagaatagcattgcatattgtccccagttgtaagcagaaaccacgatatcgcgtggaatacccactgagtcagcaagtggagccataattggcattgaaagcacggctaagcctgaagaagacggcacgattaagcctaggaaaataaatacgactaattgacctaagatgaatacgctacctggcataccactaactacattagacatataatcaaggatggtgtcagaaatcataccttgttcgagtactaagtttacgccacgagcaagaccaatgattaaggatacgcctactaattctgatgcaccttcagtgaaagattccacaatatctttttcagacaagccactgataaacataatgatgatagtaatggaaaggaaagatgcagccatttgagggaaccaccatccgccaaccattacaccccaaatcataatagggaatgcaatgcagaaaagcgttaagattaatttgtgacgagctgagaatgcgatagttgcatttggatcaaagttcttcatataacgttggcgaaattcttcgcgatcgtcataagtgaaagaaaaacttgggtcagctttgatttttttacagtaccaataaagatatacgattacgcaagttgcgcctaaagctaaacctagagcacggaaaccaataccttcagtaaattgaataccagctgcatttgatgcgataacaacggagaatgggttaattgtagagaatgccgttcccatagatgaagcaaggaatatagctcctacacagactattgcatcatatcccagagctaagaatactggcaccagaatcggatagaatgccactgcttcttcttcgataccacaggttgtaccgcctaacaccattaaaacagatacgctgaatacaataaaaaactcattgcctttggtttttttcacgagagccatcaaaccggcattaaaagaaccggtacggttaataacaccaatcataccccccaatacgaagataaagaccataacatcaacggcttcgatagttccttccaccatacttttggtgatgtcttcaatgcctttgtggtgttgttctacacgttgataggtgccaggaatagcgattggttttttgatcacgccttcggtgaaattggagagtttaatttttatattgagattatcaagagtgtctgttgtggcgggataagttttatcatcaacgccataagctttgaccacaaagacattatcagtggaattatatgttaattttgaatatgaaccagatggaattatccaggttaatccaacagcgagaattaatattgcaaataaaattgtaaacgctgatgggaaattaaacgttttcttctttttggacgcatccatagcgagctccttatgtgtaacgtttaaagtgcggttggtaaaaacatcggttaaaccgaccgcactttttactttgagaatgatttcacaaagcacctttattatttaagcgtaataggatatgccttcagcttttttcgtaatacgtgtaccagctttgcctttcacaatatccacaatatcagataaagaacctattactgcatcttttcctgtttgtttcgcaaagttgatggctgcttgtacttttggtcccatagaacctgctgcaaaaccaagttctgaaatcgctttaggtgaggcaactgaaattgctttttgggttggttttccccaatctacgaaggttgcggaaacgtcagttgcaatgatgaataaatcagcatcaagattttctgcaagtaaagctgaacataaatctttgtctataacagcttcaacaccttgtaaattatgctgttcatcataataagttggaataccaccgccacccgcacaaatgacgatactgcctttttcaagcaaccattttactgggcgaatttcaaaaatacgttttggcaatgggcttggcacaacgcgacgatatttatctccatcttgtgcgatagaccaatttttttcttttgccaaacgttcagcctcttctttcgtataaacaggaccaattggtttagttggatttttgaaagctgggtcgttgatatcaacttctacttgagataataacgttgcaaatggcacttcaaatggaactaaattaccgagttcttgttgaatcatataaccaatcattccagctgtttctgctcccaatacatctaaaggataggttggcacatcagtataggcagcaccttgtaaggcgagcaaacccacttgtgggccattaccgtgtgctatcactaattcattatttggccaaatcttagcaatttgctcacaagcaatgcgaacattttgtcgttgattttcggctgtcattggttctccgcgtcgtaataacgcattaccgcctaatgcaatcactattctcatacgttctccttaagccaaacttgctaccattaccgctttaattgtgtgcatacggttttctgcttgttcaaatgcaatgttcattggcgattcaaatacgtcttcagttacttcaataccattagctaattcaggatatttttcagcaatttgacgaccaactttggtttcgctgttatggaaggctggcaagcagtgcataaatttcacttttggattaccagtgcgtttcattaattcaggtgtgacttgataaggaagtaataatttaatgcgttcgccccaagtttctaatggttcacccattgaaacccacacatcagtatggataaaatctacgcctttcaccgctttgtcgatatcttcagttacagtaatacgagctccactttctttcgcaaatttttcgcacatttccacaagacttgcttctggtaataatgctttaggtccacaaatacgaacatccatacctaattttgcaccaattaataaaagtgaattacccatgttattgcgagcatccccaatatatacatagctaatttcacttaatggtttgtcgcaatgttcaatcatggtaagtacgtcggcaagcatttgtgttgggtggaattcatcggttaaaccattgaatactggcactccagcataatcagccagttcttgaacgatactttgtttaaagccacgatattcaatgccatcatacattctgcctaatacgcgggcggtatctttcatactttctttgtggccaatttgagaggaattagggtcgatgtaggtgacttgtgcgccttgatcataagcggcgacttcaaatgcacagcgtgtgcgggtggaggttttttcaaagatgagcgcgatatttttgccttttaatttttgttgttctgtgccagcatatttggctcgtttcaaatctcgggagagatctaagagatatttaatttcacgttctgtgtgatgaacaagactaagtaaatgtctatttttcatattgaaagccataataatctccttgtgttttgactatacattggggaataaacatacatcattcgagatactgcttgttgttcgaacagttgcattataagagaggtaaaatgaaatttgttgtcgtttttcaactggtaatgccagtatgtagaattttattgcgagatttttagtattattagaatttaataaaaataatctaacttgttatttgtttgatttctaatagtagatgaatttaaacgaaaatatgttttagtttatttttgatgaagaggaatgtgtctatctatacttaataaaagtgcggttatttttattgcagtttttaatatattgatcttcagcaagtaccatttgtatatttagtgatatgataaacatagtttattttttgaggtttttatgaatttaccttttcgagcaatggtgtctgatttagatggcacacttttaacacctgaacatttagtcggtgatcttaccattgatacgctgagagcattagagcaaaaaggcgtagatattattttggcaacaggacgcaatcataccgatgtgtcatccattcttggaaaaattggtgcggaacgtgcggttatgattacatcaaacggtgctcgtgtacgggatttacagggtaatttgctttatagcaatagtttgcctgaagaattagttcttgagctttacaaaacgccatttgatacttccaaagtatgcatgaatagctatcaagatgaaggttggtttactaataaagatattcctgcaatgcgtcagttccataaagaatctggattcgattataacgttgtcgatttctctaaacatcatggacgtgggacagaaaaagtcttttttattggtaaaacgccagaggatttagttgaagtagaaacttatttacgagataagtttggtgacgtaacgacaattgtttattctgcattagcttgtttggaagtaatgaataagaatgtttcaaaaggggatgcattaaaacatttactcgaatcacgcgagtatcagttaaaagactgtattgcttttggtgatggaatgaatgatgtagaaatgctttcttgggctggtaaaggctgtatcatgcaagatgcagatattcgtttaaaaacggcttgttcagatttggaagtaattggctcaaataaagaagaatcagtcgctcgttatttgcgaacccaatttggattagattattaatgcaggcattattattcataagttgtggtgcaatattaggcgcgtcattgcgttgggctataggattgttatttaatcctttattttcctcatttgcttttgggactttaatcgctaatttgcttggttgtttaattattggtgtattacttgggcttttttggcaatttccacaaattagttctgaatggcggttatttttaattacgggttttttaggatcgctaaccacattttcgtctttttcttccgaagttgtggaattattttttaatgacaagtggttaaatggattttgtgtattaatgatgcatttattcggatgtttagctatgactgtgttaggcatttggatatataaaatttgttctcaacttttatcttaatcccattcactttggttttgcccaattaaatcagcaaattcatcgctacgaaatccgtgtgatagcatatattgccaaattttttgtttcattttaggcgtttgctgttcgttataatttgggaattgtttacgtaacaagttctcagccatttcataccaatcaatttctgattccattaaaacttcatcaataatatcagaagacacaccttttaattggcgtaattcttgtcgaattcttcctacaccataacctttttgtgagcgtgaatttagataattttctgaaaaacgacgatcgctttgccaattttttgcttggcataaagataatgcatcatcaatttcttcttccgaaaagttcttttcctgcattttattgcggagctcgaattcactatattctctgcgggaaagaagattaactatgtaattaaaagcaagagatgacaaggaatgattcctttatttttattgagttgatataaagtgcggtcatttttaaccgcacttttggcatttgtaattttctttattcaaaatcactttctgattcagtattattttcagattgttcaatatccgccattaaggcttgttctggattggccactaattcagcacgtaaacgagcttctaattcatctgatttctctatattttcgttaagccatttcattgaattagcctttccttgaccaattttttcaccattgtaggaataccaggcgcctgatttttctacaagtttgtgttttaccccaagttctaataattcacctgcttttgaaatgccttctccatagagaatttggaaatccacttggcggaacggtgccgctaatttgtttttcactacttttacgcgggtttcatttccaataatattttcgccatcttttacagaacctgtacggcgaatatctaagcgaacagaagaatagaattttaatgcattaccgcctgtggtggtttcaggattaccaaacatcacgcctattttcatacggatttggttaataaacacaactagacagtttgcatttttaatttgacctgtgagtttacgcaaagcttgagacattaaacgtgcttgcagacccatatgagaatcgcccatatcgccttcaatttcggcttttggtgtcagtgcggcaacggagtccacaataattacatcaattgcacctgagcgaactaatgcatcacagatttcaagtgcctgttccccattatctggttgagaaacaaaaagttcttttacatctacaccaagttttgctgcataaataggatcaagtgcgtgttctgcatcaataaatgcacaggtttttcctgctttttgcgcttgagcaatgacggaaagagttaatgttgttttacccgatgattcaggcccgaaaatttctacaattcgacccataggcaaaccaccaatcccaagcgcaacatctaacccaagtgatccagtagaaatagactctacgtctaacgttttggtatcgcctaatttcataattgagcctttaccaaattgtttttcgatttgccctaatgcagctgctagtgctttttgtttttcttcttgagttgccataattaaaatcctgtttgaatgttcaattttttatgattatatctgtattgatgtacaggtcaagaaaaatatttatattaataaaaaaatatggggtatatatttcagtaaagaggatggggaaggcttaaaataaaagttttaaatatagtatatttatatataaaccaatcgtttaaataaaaataaattttaaatttacgatctggctcacaaatctgacatttatatttaggtgtagtaaaaatttcatgatataaatgaaatcagaagtacttctactgactcttttaaaataattattcattggaggtttaatatgaatataaaggatgagcatatagatagcgtttgctccttgttagatcagttagtaggaaatgtttcctttaaaaatctttttactggttacggtttgtttcacaaggaagagacaatgtttgccatttggcaaaataaaaaactttatttacgcggtgagggtgttctcgcaattcaattaactaaattaggttgtgaaccttttacaacgaatgaattgaataaacggtttgtgctttcacaatattatgcactttctgatcagattttacgtagtaatagattgtgtagaaaattgattattctttctattaagcagattcttgagcggaagctagaatgtacgttaagaaaattgaatcgattaaaggatttacccaatttaacgattaaacatgaaagagctttaataaaagttggtattacaaatgttgcgatgctaagagagatggcgcagaaaatgcannnnncattccattcattaattaattaatgaatgaatgnnnnnttttctttttacttcttctgtcttttatctttaagacattcaagaattcatcaattatttgatgattttcgcaacaacgcctgcacctactgtacggccaccttcacggattgcgaaacgtaaaccttgatccatcgcaattgggtggattaagcttactgtcatcttgatgttatcccctggcattaccatttccacgccttctggtaattcaatagtaccagttacgtctgttgtacggaaatagaattgtggacggtaacctttgaagaatggagtatgacgaccaccttcatcttttgataatacgtacacttctgattcgaagtcagtgtgtggtgtgattgaacctggtttcgctaatacttgaccacgttcgatttcttcacgtttggttccacgtaataatgcaccgatgttttcacctgcacgaccttcgtcaagtaatttacggaacatttcaacaccagttacagtagttttcgctgtatctttgataccgacgatttctacttcatcacctgtacggatgataccacgttctacacgacctgttactacagtaccacgacctgagattgagaatacatcttcgattggaagaaggaacggttggtcaatcgcacgttctggttctgggatgtaagtatctaaatggtttgctaactcaaggattttttcttcccattctgctacgccgtttaacgcttgtaatgctgaaccacgtacgattggtgtatcgtcacctgggaagtcatattgagatagaagttcacgaacttccatttctactaattctaataactcttcgtcatctaccatgtcgcatttgtttaagaatacgatgatgtatggaacacctacttggcgacctaataagatgtgctcacgagtttgtggcataggaccatctgttgctgctacgactaaaatagcaccatccatttgtgccgcaccagtaatcatatttttaacatagtcggcgtgtcccggacagtctacgtgtgcgtagtggcgagtcggtgtatcgtattcaacgtgtgaagtgttgatggtaataccacgcgctttttcttctggcgcgttatcaatttggtcaaatgcacgcgctgcaccaccgtagtgttttgcnnnnncattccattcattaattaattaatgaatgaatgnnnnnggagcacgaaggtttgctaatcacggtcggacatcgtgaggttagtgcaatggtataagcaagcttaactgcgagacagacaagtcgagcaggtacgaaagtaggtcatagtgatccggtggttctgaatggaagggccatcgctcaacggataaaaggtactccggggataacaggctgataccgcccaagagttcatatcgacggcggtgtttggcacctcgatgtcggctcatcacatcctggggctgaagtaggtcccaagggtatggctgttcgccatttaaagtggtacgcgagctgggtttagaacgtcgtgagacagttcggtccctatctgccgtgggcgtaggagaattggttggggctgctcctagtacgagaggaccggagtggacgcaccactggtgttccggttgtgtcgccagacgcattgccgggtagctaagtgcggaagagataagtgctgaaagcatctaagcacgaaacttgccaagagatgagttctcccaatctaagagatagtaagggttgttgtagactacgacgtagataggtctggtgtgtaagtgtagtgatacattgagctaacagatactaattgcccgagaggcttaactatacaacgctcaagtgtttttgggagctaagtgaagtaagagatgaaaagcgaagcaaataaaagtagagcggaaaccgaagtaaaagactaaacaaagaaaagtaaatatagaagacttaatagaaagaaaatcggattcagcttgtgaccaataagaacgagtgaaaggtagataaagactgagtaacgagcgataaaagagaaaagacgagttatcaaagaattatcctggcggcgatagtgcggtgggcccacctgagaccataccgaactcagaagtgaaacgctgtaatgccgatggtagtgtggggtttccccatgtgagagtagggcaccgccaggttttatttttttagtttattcattgagtaaattaaaaaaataaaaaatttttggcagagatagtgcaatagatccacctgataccataccgaactcagaagtgaaatgttgtaacgctgatggtagtgtggggtttccccatgtgagagtagggcaccgccaggttttatttttttagtttattcattgagtaaattaaaaaaataaaaaatttttggcagagatagtgcaatagatccacctgataccataccgaactcagaagtgaaatgttgtaacgctgatggtagtgtggggtttccccatgtgagagtaaggcactgccaatcatcatttttagcggagtggtagttcagctggttagaatacctgcctgtcacgcagggggtcgcgggttcgagtcccgtccattccgccaattcatatcatagtttattgataccaataggggcgtagttcaattggtagagcaccggtctccaaaaccgggtgttgggagttcgagcctctccgcccctgccataaaaaacctttcattttcaataatttactacattgtaaaaattttcttgtgagaaatcatcctattcttgtagtgtaaatgtgacatttattcataaactttattatgtgatcgcatttaaatgcgtaggaatataataatttctaataattaattttgtttaatattataagtaatagttttttgaacattatttttaaataattttgatcagttttataattttacattagtaatacgagtcttaattttgttgtaaggaataaaaatggaagagtccccagaattagaaaaattgccacgaatcattactgatgtattgaaaattgtgctttgtacagcgttgattgtgctagcgattgtgcttattattgcccttgtaaaaataacttatactttacctatgatggtgcttaacacttcgtctgttgtaccttatgatgttgctgaacaagcagtaatgtttttcttatatttcgggtttattggtttgattgtgcagtattttaaaagcggatatcacttccctttacgctattttatttatgctgggatcactgcgatgttgcgtttaatcattgttaatcatgaaagctcgatggataccatcttatttgcaggcgcaattttgattatggtgatcgcactctgtttggtgttatattctaataaactgaaaaatatatagttttagattcaaaacaacaaaaaacgcacttcatttgaagtgcgttttgtctttttagttgagctactcagatttgctttctaaaagtgcggttgaattttcttctgttttttcttccgcactttctggaatgacatcctgaattgccatcattgatttcaaactctcttggcgaacttgttcagctaatgctttatcgcccgcttgttcaaatacataagatgccatcatcaaatcattttgttctaattgttcagggcaagcgatcacgtttttgaatacatctgctgctttaataaattcattgttacgaacatataaataacccaaagcacgattgatacagcatttttgtttttcatccacacgttttgcacgtttttctattagcttgagaagtttactgttatcttctggttgtaaacgtgtaatttgagtacaaagaggtaaactgattgctgtattgtcaccgagttttttcagtatttcaaatgtcaattcagtagctgattcatgatcattacagtcaattaaacgttgaataaggctaattttaagttcaatattgctacgacgatgacgaggttgctgattccaccaagttagtaagccatcaattccttcttcgttcattttctcgtcgagtaaaccattttcggttttagagcgaagagctttgaattcttcatcattgaataaaccgctattcgcaacattgtctaaaattttatctagagcttgataggctttagaacgaagataaatttctactgcgagttttaatacttctttattgcgacgagccatttctaataagctatctacagaactgcgcgctgcaggtaacttgttttgttgcaataaaatgcgagtacgggcaatttccacgagcaaattatcagagccggctaattctgttgcttcaattaaatagcgatttgcactaaattcgtcgccacgttgttgagcggcttctgctgctttgatgagatttagtacaggttcagcagaatgtttagcatttttgccaattaatttttctgctttagcgtaatccccttcatccatttttaccaagccttcaagggtttgtttttgcgcttttacacgtttgcgattagaaaaccattgataagagctacgacttaaacgaaagaaacgagtgatgccccattcaaaagcataaattattgctaaagaaataatgaaaaaaatcactaaggtagtgatggacatttctataatacgatttgctgtctcaatgcgcacataaccttgctgaccagaaatataaggccctgctacaagtcctacaagcaatgtcagcattaaaaaaagcactctaaacatagacttatccttattgttgtgattcagattgtgttggtttaacaacttctactttaggcattgtatcaatcgccttgtctgcttcaatttctactttttgtagatctaaagctgtacgattaagatatttgtcaagtaatgttaaactttttaattgctctggtacatctacataaatagaagtatcagtcaatccatctactaattttaagaaattttgtgttacttcagcgtttgtatcaaaatagctacgaacccaagaagaaacagcttctagagattgtttataaagttcattttgctgacgaggaactgccataatcgcaagctgtaaacgtagacgaatgttctcacgaagataaatatcttgatttggtgcaagtaattcttttttatttgaattttgttttggcgaaatacgaataaaatgatttaggaaagaggttgcgcttttttcaatattttgttgccagtcagtaatgttgttggataatttatcattatttttagatgtttcatcaaaatttacattcaaagcctgtaattcatcgactgtgtttgcaagctgtgatagtttttgcattatcgcattttgatccacacttgaaagcgaaagaagttgttttaaatcttgattgattgcactacgaatttcatttgcttgtgaattattaaccttgacgagggtttcatcagctaattttaataaagaaaccgctgtatcaacatcgttatctaaaacaagtttacgcagggcattatttagtaaaaaatcagcttcggaaaataaccaatcgcttggttgttgtgcgatggcaagctgacttacttgtttcatttgagtttgtaaggatgttatttcccctgttttgcttacaattaattgttccagttgagctatattttcttgtgcagtttttaaactctgttctaattgtgtaagtcgtttattgttattggtgttatttgaggaaagatttgctcccgtttgattttcaagtgcggttaatttctgttgaattttagccatttgctgctgaccaaaatagtatccagctccaccaatacctagagcaataagtattgctaataaactcaatgctgtacccgtttttttcacaatagtttgcggaacagactgcattgtttcagcttgttcaacagctgttttgggcgtatctgtaagttgttcggtgaggtcgttaggttgctcttttgccatatcaattccttaataagtgatattgagtaaggtattttataatacttcgcgttgataaaaaaatatcaagctatccactaataatagaaaatatagatttttatatcggcagaattaagctatttacgcaataaaattaggtgctatcctaccactcttaggtaaaaaagtcattttgattgttgataggtaaaacttataatatattttaaaaaattgtgatttatgtcacatttttttgcatttatactccctaagtggtaaattgttcgccaatttttgttgttctggtagggacaccacgtggaatgtaatctagcacaagcaaaacaatgggttagcgccttggatcaacgccgttttgagcgtgcattacaaggttcaggcgatgcattccaacacgttttagcgattgcacctttacttctacacctaaaccatccgcaacttcccggctatgttattcacgccccctctggcattgcgaatttccttgcttctgattatcaaaaaaaatggctcaccaatgaatacggtattcactatgccgatcataagccatcaacactcaaaagtgcggtaaattttcacgaagttttaccaccaattctaggcgtttatgtaatgggtagctttggctcaataagtcaaacctcttcttcagatcttgatacttggatttgtgtccgtgatggcttgagtccagatgaatatacacttcttactcaaaaagccaagcggattagtgaatgggcaatgcaatttaatgtggaaattaatttttatttgatggatcaacaacgtttccgcaatgaacattatgctgacccactgactattgaaaatagcggctctgcgcaatatatgttattgcttgatgagttctatcgctccgccgtacgcttggcaggtaaacctctactttggttgcatttatgggtggaaaatgaaaaagactatgaaaaagaggtggcgcgtttaattacggaaggggaaattgatccaaatgattgggtagatttcggcggtttaggacaattttctgcaaacgaatatttcggtgccagtttatggcatctttataaagggattgattcaccttataaatctgtgctcaaaattttgttgttggaagcctattccaaggaatacccaaacacttgcttaattgcccgcacttttaagcgagatttacttgcaggcaatatcaatcctgatcaccattttgatccttacattgccattcttgcaaaagtaacccaatatttaaccgcactttctgaatttaaacgtttggattttgtgcaccgttgtttctatgtgaaagcaacggaagattttgcacgttaccaagccaataattggcgtattcgttatatggaaatccttgcgcaagaatggggatggtctgcagaaacggtaaaacatctcaataagcgtccattttggaaaattaaggcagtaaaagaaaaccacgataacataatgaaatttttaatgttgagttatcgtaatttagtggaatttgctcgaaagcatcacattcactcgagcgtcgtgccacaagatatcaacattctttctcgtaaactttatactgcttttgaagaacttcccggcaaagtgtccttactcaacacacagatatctcacaatttatcagaaacacacctgacttttgtggaagttcgtggcaataaacattttaaagatggttggtaccttatcaatcaaccaatacaccatattatgttctccaaagaacgggtgatcgaatacggagaaagcctgaataaattagtttcttgggcttatttcaatcatttactcactgaaaaaaccgaattgtcaatttttagcaagaatgtgactttaagtacattacaacgctttgtcactaacttacgtcagtcttttccaagcaccatcgccaaacaacctaaaaatagcgatttattgaatcaatgtgaaattcgtagcttgtttattgccataaatctcacgaccgatccaacatccaaagtagaagaagtattaacgggtatttcatcgcgagatttatttagttttggatcgcttgagcaaagccttgtgggcagtatcgattttacttatcgtaacgtgtggaatgaaatccgaacgctccattttgaagggcaaaatgccattttgcttgcgctaaaagtactttctaacaaaatttatcgtggcgttaatcgcccagattccatccaagtctattgttatagtgaacgttatcgccaagatttacgtcaattagtgatgggattagtcaatcgatgcgttagcatccaagtaggcgatattcaacaaccttgccaaacgtcacgtttacgcgtagcgggtaaaaactggcaattattttttgaagatcgcggcatcagcttacaagaaatcggaaatgaatcggtctgtaatgacgctgaaagtgcggtggattttgacgaagttttacaaacaccaattgaagatggcgagacaaaccaagaaagtcgtcgctatccaccagaaatggatgccttcgcaagtgaaggattcctacaattcttttttgaagataattctgatcacagcttcaatgtttatattttagatgaatctaatcatctcgaaatctatcgccactgcgatggtgaaaaagatgaaaaagtgcgggagattaatcaactttatcaaaacgccaaacaggaaggcgataaaaatccttacaatatcgttcaacataattttaactaccctcaattttatcaactacaaaatggaaaaaatggcatatccattgtgccgtttaaattccgccaaatgaataagtaatattttcctgtggttgataggttaccgaaagatatctatacttatttcctcttttactagataaattgtagatatgataacttcgcaaacaccaatcactgtgctaggtgcgggatcttatggaactgcgctggcaattaccttttctcgcaatggttctcccactcacttatgggggcacaatcccgtccatatcgcacaaatgcagacagaacgacaaaattatcgttttttgccggatgtcatctttcctgaggatcttcatttagaaagtaatcttgcacaagcaatggaatattctcaagatattttaatcgtggtgccaagccatgctttcggtgaaattcttataaaaatcaaaccgcacttaaaagcccatcaccgattaatttgggcaacaaaaggtttggaacgtaacacagggcgtttactacaaaccgtagttgaagaacaactcggaacgcaatatccactagctgtactttctggcccaacttttgcaaaagaattagcgcaaggtctaccatcagctattacgcttgctgccaataacgagcaattcgcacgggaatttcagtctcgtattcattgtagtaaaggtttccgagtttatataaattcggatatgactggcgttcaacttggtggtgcaattaaaaatgtgatcgcaattggcgcgggtatttcagacggtatgggatttggcgcaaatgctcgcacagcactgattactcgaggtattgcagaaattacccgcttaggtatctcgctcggtgcaaataccaatacatttatgggaatgtctggattgggcgatttagtgctaacttgcaccgataatcaatcgcgcaatcgacgttttggattaatgctaggtaaaggattagatgcccaaatggctatggaaaatatcgggcaagtcgtagaaggtttttataatacaaaagaagcctatttgcttgcacaaagacaaggtgtggaaatgccgattacagaacaaatttatcaaatgctgttttgtggcaaaagcgcacaagatgtagccatcagccttttggggcgagaatgtaaaggcgaataaaataaaaggagaaattatgacattagatgtgtggcaacatattcgccaagaagccaaagaacttgctgaaaacgaacctatgcttgctagtttttttcactctacaattttaaagcatcaaaatctgggcggtgcgctaagttatttattggctaacaaattagccaatcctattatgccagctatttctctccgtgaaattattgaggaagcctatcaatctaatccttcgattattgattgcgctgcttgcgatatccaagctgtccgccaccgagatcccgctgtagaattgtggtccactccattgctttatttaaaaggtttccatgcgattcaaagttatcgaattacccattatttatggaatcaaaatcgtaaatcccttgccctttatttacaaaaccaaatttcagtagctttcgatgtagatattcacccagcggcgaaaattggccatggtattatgttcgatcacgcaacaggtattgttgtgggtgaaacatctgtaatcgaaaatgatgtttcaattttgcaaggggtaacgcttggcggtacgggaaaagaatcaggcgatcgtcatcccaaagtacgcgagggtgttatgattggggcgggtgcaaaaattctcggtaatattgaagtaggtaaatacgccaaaattggggcaaactctgttgtgcttaaccctgtgccggaatatgccacagcggctggcgtgccagctcgaattgtaagtcaagataaagcagcaaaacctgcttttgatatgaaccaatattttatcggcattgatgatggaatgaatttaaatatataaggaaacaccatgatcaacaaagatacccaactctgtatgtctttatcgggtcttccaggcaatttcggtactacctttcacaattatttgtacgacaagctaggattgaatttcatttataaagcattcaccacgcaagatattgagcacgccatcaaaggcgttcgcgcattaggcatccgtggttgtgctgtttcaatgccattcaaagaaacttgtatgccatttttagatgaaattcatccgtcagcacaagctattgaatccctaaataccatcgtgaacgataatggctttttgcgtgcatataacactgattacattgccatcgtaaaattaattgaaaaatatcatttaaataaaaatgctaaagtcattgttcatggcagtggcggtatggcaaaagccgttgtggtcgcctttaaaaattcaggttttgagaagttaaaaatttacgcacgcaacgtaaaaacaggtcaatatctcgccgcactttatggctacgcatacatcaattctttagaaaaccaacaggcagatattttagtcaatgttacgccaatcggcatgaaaggcggcaaggaagaaatggatttagcctttccaaaagcgttcattgataatgctagtgtcgcgtttgatgtagtggctatgcctgttgaaacgccctttattcgttatgctcaagcacgaggaaaacaaactatttctggcgcagaagtgattgtacttcaggctgtagaacaatttgaactttatacgcatcaacgcccaagcgatgaattaatcgctgaagctgcggcgtttgctcgaacaaaattttgaaataaagatatggtacattgtgtttttattaaaatttgttgctctcgatcacatttctgaatattgctcgttgcatctttataacattcatttaacattgaaccctatttaagtgatagctctaacggaggaactttatgggtgagatggcatctttaagaagtcataaaaatggcattatttttattttagatattgtgctgttttttgtgttattaaatgtattaccttttgaaccaaaagctaattctggtttggcattattagcttttatcgcggtgctttggttaagtgaagcattacacgttactattactgcattattagttccacttttggctgtggcattgggattagttagcaccaaacaagctttagttggttttgctgatccgacaatatttttattttttggtggcttttccttggcgacggcattgcatattcaaaaacttgataaattgattgccaataagattatggcactagcacgcggtaatttatttattgcagttatttatctctttttgattacagcctttctttctatgtggatgagtaacacggcaactgctgcaatgatgttacccctcgccatgggtattttaagccagcttgatcgcgaaaaagatcataacacctatgtgtttgtgctgttagggattgcttacagtgcatcaattggtggtatgggaacccttgtaggaagcccaccaaatgcaattgtagcaagtaatttaaatttaactttttctgattggttatggtatggcttaccaataatgattattttgttgccgttgatgattgggattctttatattattttcaaaccaaaacttcatctcaattttgaacagacctttgaaaatattgaaatgaatcctatgcgtatattgacgtttattattttttcagtcattgctttaacgtggatatttagcggtaaaattaatccgtttatttcaggattactaggattacaaaaaaacattgcaagttttgatagtatcgtagccttattggcggcaattgttatttgttcaacaggcgttgcaagttggaaacaaattcaatcaaataccgattggggcgtattaatgcttttcggtggtggattaacattaagtgcggtgttgaaggattctggtgcaagtaaaattttagcggatagtattgtttttatgattgatggacaacatttctatcttattggtttattagttgcggcgttcattattttcttaactgaatttacttctaatacagcgagtgcggcgttacttgtacctatctttatttctatcgctcaatcattgggtatgccagaaattggtttagcattaattattggtattggtgcatcctgtgcctttatgctaccagtagcgacaccaccaaatgcgattgtatttggctctggtcaagtaaaacaaagtgaaatggtcaaagttggtttcttactgaatttagtctgtgttgtagttattgccactatgggttatatgttctggcttaaataatatagaattgtttacttttaataaatgatgattgaagatcataaatttaaacgtaagaagtacaataaagccatttaaataaatgggttaaagcaaatgaagctttaacccatttttcataactgttctatacaaagctatttattgtgttcataagcataaagcgtattgctcatcaacattgcaacggtcattggcccaacgccaccagggactggtgtaatgtaagccgctttttcggctgctttatcaaactctacatcgcctactaattttccatctacacggttaattccaacatcaattactaccgcactttctttgatccaatcgccagaaattaaatttggtttacctaccgcaacgacaagtatatctgcttggcgaacgtggttttccaaatttttagtgaatctatgtgttactgtgacggttgcccctgctaataataattctaaagacattgggcggccgacaatattggatgcgcctacaattactgcgtgcttgcagtgtaaatcaatacccgttgtttctaatagtttcatcacaccataaggtgtacaagcacgtaaagttggaatacgttggcataaccgcccaacattataaggatgaaagccatctacatcttttttaggatcgatacgttcaataatagcttccgcattaatttgttttggcaaggggagttgcaccaaaataccgtcaatatttttatctgcgttaagttggtcaataatcgctaataattcattttgcgtggttgtttcagggaggtcataagatttagagagaataccgacttcctcgcaacttttacgtttattgcccacataaatttgcgaagcaggatcagcaccaacgaggattacagcaagtcctggagcgcgttttccttgttcaatataatgggttattttatctgctaaattagctttaatttgttttgaaagttcagtaccagagatgatttttgcggccattgagctatccttgatattatgtgatgaaaaagaaagcgtttgctattttaacgaacaatgatttttttacaatgaaaaagggggatatttcttaaagtggaataattttgaacaattaagttgaaaaatcaaaaatttcattgactgaaataaaaacaaacttataattgaccgcacttatcggcgagtagcgcagcttggtagcgcaactggtttgggaccagtgggtcgtaggttcaaatcctatctcgccgaccacttctttcgtattttcttgaaatttttataaaagaaatcctttgaatgcgcccttagctcagctggatagagcaacgcccttctaaggcgtgggtcaaaggttcgaatcctttagggcgtgccattcgttatctgtttaactagatcctgtttagttttttcaaatataagtactttcagtctgttagattttatgcttataatctgcatcatttgagtgaagaagcttaaatacactcttaatgatgcagataaaaacaatattttggctatttaagtattttccaagctctaaagccataaatggcaattactacaaaacagattaatggtaggataaaggagaaatttactgctggaagtcccataacttcgccttggtcaataatcattccttgtagtggtggcattaatgcgccgcctacaatagccattactaaacctgcagctcctaatgtcgattcctcttttaagccatagagggcaataccataaatggtagggaacattaaagacataaaacctgaggttaaaattaggcagtatagaccccatacaccgtcaataaagataactccgagaatacttaaaaaaccaccaatagcaaagagcatcagcataaattctgcttttaaatatttcattaatgccgtgctaataaagcgactgctaataaaaatagccatagcaatgatgttaaagttttgcccttcagctttagtaaaacctaaacgttcagcgtattgtacgataaatgtccaacacatgatttgaacacctacgtaaaaggcttgtgcgatcacgccttcacgatatttggctttttgcgccagtctacttactgctgttttaaagctgatttgtctggcctcttctatttttacggctggcatttttttcaatccaatgataataaacactgcaaccacgacaaaaccgagtgctatgtaaggatcgcgaatttcagctaaatcatgggtgcgaatactcattttttctgcttcagacagggtgtggaaaatcaaattacctgcagcatcacgtttgtcagattcaagattagttaggactaactgggaagcaacaaacatacctgtaattgaaccaagtggattaaatgattgtgcgaaatttaaacgtcgagtagctgtttgaggatctcccattgcgagaatataaggattggcagtggtttccaaaaaagcgagcccaaaggttaaaatataaagggagactaaaaagaaattaaatatttcatattgcgcagctggccaaaataaaaatgcacctattgcataaagagcaagccccagaagaatccccgctttgtagctatagcgactggcaaataatgccgcaggaatagccattgtgccgtatcctccataaaaagctaattgtaccaatgccgcttctgaggctggaatttccattactgtttgaaataccgcaaccatcggattggtaatgtcgttggcaaatccccaaagagcaaataagctagtaataagcacaaaggggacgatgaatttcttttctaaaactttggcgttcataatgttttcctcatgtaagtgatggggtataacaagatttaggattcttcaatacgtaatccataggtgtggaatttacctaacactacctgcatttgctctttgctgagcagtggaatttctaagcctgtagagagtaatttcaaataccaagacgctaatacttctacttcttgtgcgagccataaggctttatctaggttttctccgcaagtgattaaaccatggtgtgctagtaaaatggctttgctttctttgattcccgttgcgacataactagctaattcgtgactaccaaatgttgcataaggtacacaaggaatatgatctgtgccgcttacggctaccatgtaatgaattgcaggaataggtttttcgagaatggataagcctgcacagtgaatggaatgattgtggacaacggcatttgcttcagggcgagtatgataaacactcaagtgaaattgccattcgcttgatggtaatttattttcttcgtgtttgccatttccatcaacataaacaatattttctgtcttcattaagtgatatggcatacctgtcggggtaatcagcattccatctttataacgaacactaacgtttcccgctgtgccttgatttaaacctaattttgtcatttcaaggcaagtattaatgattttttgtgataattctgctctgttcattttgtagtacctctattgtttataaaatgggagtaaccccttttttaatgataatgttgccatattttgcgatctcaccactgacaacaacagcataagcctgtttagcacgggtataaaaatcgaagcgttctagacaggttaaatttggtgtgaaaccgaccgcactttcaatcgcatttaagtaacgagtttcaacattcggatctaaagaatctccctcaactgctttcatcatcaacagaggggcatcaacataagcgtcaaattcgaataagggagttattgcttcaagtaaaatatctatagatataccatctgcacgtattacatttttatgtagtgaatgtgcgggaaaatgggcgtcagctagaactatctcatcgccatgccccatttcggcgagggtttttagtaattcaggagaaagagctgggtgaataccttttagcattttgttgttccttctagtttgggtaaattcgttttcttgttggttgcatcgcttgctgtgccgcgtttacattttcgtaaatgcctacgcctgcaaaggtaaacattgcggcaccaagtacagtactttcagaaatgtccacaacatcaatcggtaaatttaaggtgtttgcacggatttgattccacaatacattttttgaaccacccccaacacaaattaagcttttagcttggaactgactgacttgatgtagcacggataaaccgtttttgagtttatttgccatatgttgtaatgcgctgacataaatttctccacgagtagcaaacatggaaagtccactgatattaccttgtcctagttggctaaaaataccttcaaaattgaccgttctttttcccgcattaaaagctttttctccctctttgatcattgtggtgtaatagtgatcgctgccataaacatcggaaaataataatttacctaaccattctatgacgccagaacccacccattgtaccgctggattaaagcaattggattgtgcatcaaattcagtggttaagccttgagaaacaaactcaaatctaggttctgcgtgctgggttctagccattaagatttcccaggtgccagaacttaacacaggctgatttagccctgcaccagacccaaacacagcaaattgagtatcatgtccacaagaaatgacaggtacgggatttaatccccatttctgggctaacggtgtacgtaattttccaactttttcacctgcataacgcataggagggaaatggttattacttaaacccagcgatgttaaaatcgatggatcccaattaccgctagtaaggtttgtcatcattgatgttcccgccattgtgtgatctgtagtgaattgaccagttaagcgttcagtgagcattgacgaaataaaaacgaatttagccattttttggaaaacatctggcctgtgtgtttttaaccaatgtaatttaaataaagtattaaaactgtattgaccaatgccgttacgttgataaagatatttgatatctaattgattagatagattttccattactggtatggttcgtgggcatttccatgaaataatcggataaagttgttgatcattttcatcaaaaggtgcgccatccacgccgaaagtggtaacagatattcctacaatatcttttaaatcaataccttgttgcattaattgattgaaggtttgagttgcacaagaggttaatttttgccagatttcttcaatatcccaaatatgataatcagatgattcgattccttgttttgtattattagcaaggtgatgagaggcaagaatttgtcctttttcatttatcgcaatggtgcgtaaatttgttgcgccacagtcaaaaatcaatgcgatagccataaaaactctcctcagtgcagtcaaaaatcattatgtttttgaccgcacttttttataaaaacaaattaggggttatttataaagcggaccaaagttttggcaggcacgataatcttgcccttccttgtcttgaccaaatccattccaagcgctagggcggaaaatatttttctctgatacattatgcatacagactggaatgcgtaacattgaagcaagagtgattagatcagcccccacatgaccgtgagtcgctacacagtgatttgcgccccaatttgccatgactgaatacacatcagtaaatgcaccttttccagttaaacgtggaacaaaccatgttgttggccaagtttcattagtacgttgatttaatttattatgtacatcttgaggtaagtcgattgaccagccttccgcaatttgtaaaacgggacctaaacctttaataagattaatacggtgcattgtaaacggtatgccacctttggttaggaattgagaagataaaccgccccctcgaaaatattcgtgaacagcaggacaccaacgtgtattttctaagcagcgttttgcttcttcttcggtaacatcccatgctggttttaaagttggattgccttgagcatcttgatgttctcccgttccatcaagtgcagctgaacctgaattgattaaatgaatgaatccactttcaggtcgccatccagtgacacgctcaaccgaatcttgactccaataagtacgcacatctgcgaaaatttgagctttgccagttaattgatgcccaaataacattcctattgcatttaaactatcattttccgtggcaagaatataaggtggacgcacgccattccagtcataagttgaattgagcattgcctccataaaatcgccgtttggcaaatgatcagtccaatgacgctgcccttgaaaacctgctgcaatggcattatgacctaaggcttcttctgcataatttaatgttgctaattttggatttcctaccatcaaatcacgagtgataatggtcattttcacaacattttcccaaagttctgcacgctcttccgcattgcgttgattctctaggctatttacatcaaccccttctttgcaatattgtttaacccaactcaaggctaaatcaacttcttcttgatcataaattttgcggtctaaacggcgtttaatttccatcatatccacatattcattacgcatacctaaatattcttggaagaaagcttgatttacaatagaacctgcaattcccatggaaactgacccaatagataaataggattttcctcgaatacttgcaacagcaagtccagcacgagcaaaacgcaataatttttcttttacatcttcaggaatgcttgtgtcatcggcttcttgaacttctgtgccgtaaatggaaaaggctggtagtcctaattgagaatgaccagcaagggcggcagccaagtaaaccgcacctgggcgttccgtaccgttaaatccccaaattgctttaggcatgtgaggatccatatcaatggtttctgagccataacaccaacaaggggtaacggtaatggttaatccaacgttttcgcgtttaaatttatccgcacaggcggctgcttcggctacaccgccgatagtgctatctgcaactacacattcaacgaaagtaccatctgtatgacgaatatgtgtttgtaataattgagcaacagattgagccatacgtattgtttgggtttcaagagattctcgaacccccattcgacgaccatcaatagttggacgaataccgatttttatacgatttgattgagtagcaagagccatagttacactcctttgtttgtgcttaagtaagaatgatgaaatcactgcagaacaaatggtgttttcattgaattagagtgtgaaagaaaaatgataaggaaaacagtaagaaatgaaattttgttgcaaaactgcgaagcagatcacaaaaattgactatatttaaggaaatgtatatgaccgattctttcaatttttagtaattttcggtcaaaatggtcatctatttttataaaacggtcattatatcgtgttgctcacaatatttttgtaagttatcgggaagtgaccgatcagaaaaaatggtattaattttgcttaaatcggcaagttgaatcaaacttgttttttcaaatttagaagaatcaattaacaaataagcacgttctgaagcttccatcatttttcgttttaaagaggcattcagctcgtttgattcccagatattaccgtttttatcaattcctgaacaagaaaacactgaaaaattaatatgtaatcgttgtaataagtactcagataagggaccgtaaaatgcttcatattttgctgaataaactccgccagtaacaatagttttaacattggatttattaactagggcattaatgttaaacattgaattggttactactgtacaaggaatatcgggcattaaataagcaaaataccagcttgttgagcttgcatctaaacctataacggcattttcatatagcaaatccaaggctttttgggcaatatgtcgtttagctgttgcattaatatgttttcgagtttggaaaaatgaacctaaatctttggttttattactcactgctcctccgtgggttcggtgcaataagcctttgttcgctaatttgttcaaatcgcgacgaatggtttccaccgaaatatcacaatgctgtgcaagttctattacgctggcttttccttgttgatttacccattgtaaaattaattcatcacgataattcatctcttttcctatacggtggatttagtcgagattctagtttacgcttgagtatattgaaaatccaaggataaattatattggggtgacgtatatctaaaagtgcggtcaattttttgtgagtttcttttcaagagtatgcaagctacaatacgccccccaagttttatcaatgtaaatcagaaagagaataattatgccctttgctattggtcagcgttggttaagtgaaagtgaaaacgctttaggattaggtgttattaccgcattagatcaacgaaccgtcacgatttatttccctgctgcggatgaaacgcggatatatgctactgcacaagcgcctttaagccgaattgtatttagtaaaggtgaaaccttatcccatcaagctggctggcaaggcgagattttagacgttcaaaatatgaacggtttgttgttttatttagttaaaaatccacaagatgaagatgttattgtgcaagaacgtgatatttcgccgattatttcttttagtcaagcgaaagatcgcctcttttcagcacaaattgatcgcagcactcattttgcattgcgttatcgcacgctttgtcatcagcaagcacaatttaaatcgccattgcgtggtttacgcggaacgcgtgcaagtttaattccccatcagcttcatattgcagctgaagtcggtaatcgagttaatcctcgcgtgttattggcggatgaggttggtttagggaaaaccattgaagcaggaatgattttgcagaatcaactttttgctgagaaagtgcaacgtgttcttattatcgtgccagaaaccttgcaacatcaatggctggtggaaatgcttcgtcgttttaatttgcattttgcactttttgatgaagaacgttgcaacgattttgatcttgatgccgttaatccattcacgactgaaagtttaattatctgttcgctgaattggttagaaactcatccaaaccgagtggagcaggcgctcaatgctcaatttgactgtttaattgtggacgaagcccatcatttggtgtggtctgaaacctcgccaagtgcagcttatttattagttgaacagcttgctcgtatcattccatccgtcttgttactcactgcaactccagagcaacttgggcaagaaagtcattttgctcgtttgcgcttactggatccagaacgtttctttgattatcaaacctttgtgaaagagcaggaacgctatcaacctgtggttaatgccgttgaatctttgttggcaaataaggcattaagtgcggtcgaaaaaaatcatatttctgatttattgcttgaacaagatgtcgagccactttttaaagcaattgcatcaaataatgatgaagaacaacagcgtgcccgtcaggaattgattcaagccttaattgatcgtcacggcacggggcgaatgttattccgcaatacacgtcaaggggtgaaaggttttccgcaccgtgtttatcatcaaattactctctctgaagagaatgataaaattgattggctgattgacttcctcaaactacatcgcaatgaaaaaatctttgtgatttgccagacggcggcaactgcgattcagttagaacaaattttacgtgaacgtgaggcgattcgcgccgcagtgtttcacgaaaaaatgtcgattatcgaacgggatagagccgcggcttattttgcggatttagaaaacggcgcgcaggttttactgagctcgagtattggctcggaagggcgtaatttccaattcgcagcaaatttagtgttatttgatttaccgacaaatcctgatttattggaacaatgtattggccgattagatcgtattggacaaaaacgtgatgtgcaaatttatgtgccttgtgcgaaagattcgcctcaaagtcgtttagcacgttggtacaatgagggattgaatgcttttgaacaaacttgtccaatgggaatggcattattttctcagtttgccgatgagttggaaaaagtgcggtcaaattctaccgcactttcagagaatgaattttctggattattaaaacaaactaaaaccgcacgggaaaaactcaagattgagttagaaaaaggtcgcgatcgtttattagagctaaattctcatggcggtgagcaagcacaagcattagcggatcaaattgctgatgaagataattcgccagagcttgtgaattttgctttaaaattatttgatattattggcgtagagcaagaagatcttggggctaatagtattgtaattagtccaactgggacaatgcttgtgcccgattttccaggtttaaaagaagaaggtgtgacggttacctttgatcgcgaacttgcccttgcccgcgaagaaatggaattcttgacttgggatcatcctatgattcgtcaaggtattgatcttgttgcttcgggtgatattggcaaagccgcaatggcattgcttgtgaataaacaactgcccgctggaaccttattaattgaattgatttatgtggtggaaagccaatcgccaaaaggattacagctcaatcgtttcttgccgccaacgcctattcgtctgctgcttgataacaaaggaaataacatgggtgagcaggttgcctttgaaaccttgcatagcaaattgaaaccacttggtaaaaatattgctaatcaaatggtgaaaatggcacgtgccaatattgaagtcttgattacacaaggcgatcaactcgtaaaatctttagctgaaccgattattgctgaagctaaaaatcaagcagatcaacaattaagcgcagaaattaatcgtttacaggctttgcgagcagtgaataaaaatattcgccagagcgaaattgatattttggaacaacaacgaacacaatcactggacgagctttctaaagcaaattggcgtttggattgcttgcgtgtcattgtgacgaacaaggaataaaaatggcattgattgaatacaatccgccccttgaaccttatttggatattatttatcaagataatcatttgtgcgtggtaaacaaaccgagcggtttgctttccgtaccaggcaatcaaccacaatattacgatagcgcaatgagtcgagtaaaagaaaaattcggcttttgtgagcctgctcatcgtttggatatggcaacgagtggtattattgtgtttgctttaagtaaggcggcggatcgtgaattaaaacgtcaatttcgcgaacgtgaaccgaaaaaacattatcaagcgattgtttgggggcatttggagaacgattatggcgaggtaaatttgccgatgatttgtgattgggaaaatcgacctcgccaacgtttggatttcgttttaggaaaaagagcggtcacaaaattcgaagttttagcacgtttgccgaataacagtactcgcgtgaaactgacgcccgtgacaggcagatctcatcaattacgcttgcacatgttagcattggggcatccaattctaggcgataaattttattctcatccacaggctaaagctatgtcgtcaagattatgtttgcacgcagaagaattgacgattacccaccccattacaggggaaacaatgacttttaatgcgaagtccgatttttaaatttgcacagaagtatgagatcacgaatgaaaaactttttagctcaacaaggaaagatcacgttaattcttaccgcactttgtgcgcttatttatcttgctcaacagctggggtttgaagacgatattatgtatttgatgcattacccagcttacgaagagcaagatagcgaagcgtggcgttatatttcacatacactggtacatttatctaatttgcatattttgtttaatctgtcttggttttttattttcggtggaatgattgagcgcacttttggttcggtcaaattattgatgttgtatgttgtagcatctgccataacaggctatgtgcaaaattatgtgtctggccccgctttttttgggctttctggtgttgtatatgcggttctaggttatgtatttatacgtgataaattgaatcatcatttatttgatctgccagaaggttttttcacaatgttattggtggggatcgcattaggttttattagccccttatttggtgttgaaatgggaaatgcagcgcatatatcaggcttgattgttggcttgatttggggatttattgatagcaaattgtgcaaaaattcgctagagtaagcccgtttaatttggataaaggattcgctatgaaacaatcgttacgccatcaaaaaattattaaactggtgggacaatctggctatttaagcacggaagaattggttactgccttagatgttagccctcaaacgattcgccgtgatttgaatattttggcggagttagatttaattcgtcgccatcacggcggtgcggcatcgccatcttctgcagaaaattctgattacgtggatcgtaagcaattcttttcattacaaaaaaataatattgcgcaggaagtcgcaaagttgattcctaacggcgcatctttgtttattgatattggtaccacgcctgaggctgtcgccaatgcattgcttggtcacaaaaaactccgaattgtgacgaacaatctgaatgccgctcatcttttatgccaaaatgaaagttttgatattgttatggcgggcggatcattgcgaatggatggtggaattatcggcgaagctacggtgaattttatttctcaatttcgcctagatttcgggattttagggattagcgcgatcgatgctgatggttcattattggattatgattaccatgaagtacaagtaaagcgagcgattattgaaagttcacgtcagaccttattagtgaccgatcgctctaaatttacgcgccaagcaattgttcgattgggcgaattaagtgatgtggaatatttgtttacggatgatgttcccgaaggaattgctaattatctgaaagctcagaaaacaaaattggtgttatgtaatggtaaagtgcggtaaaaatatctttgattttcttattaatttgtcgataaaagaagctattactcttaatttttgatttaattgaaatttatctaaaagtaatctaaatattctctctctgaattattgtcttttctataattaaacatttccaagcgtaaaagtattttatttttttatcaattaaagaaatttcatatttctgtattatctaattagttttagctatcaatattctttaaaacattcagagcttagataagaaaatcccttgcagagcaagggatttagtaattaattaaagtgcggtagaaattaccaaccttttacaacaccatctttaaagtgtttttgagcttcttggtaaacttcttctgtttggtaagattttacgaaatcttgaacagctttgctgtctttgttatcggtacgagaaacgataatgttcacatatggcgaatctttatcttctacaaatacaccgtcatcttgagcatttaagcctacttgacccgcataagtattgtttactacagctaaatcaacgtcgtctaatgcgcgtgccgcaacagaagtatctacttcagtgatgtttaattttttcggattttcaacaatatctaatacagttgaaagaaggttatttgcatcttttaatttgattaaaccttgtttctcaagaagaattaatgcacggccacggtttgttggatcgttaggaacaacaactttagcaccgtcttgtaattcattcacatttttgatttttttagaataacccgctaatggatagacgaaagtattacccacgataactaagttatttaaatttttcgcttttgcatcttcatctaaataaggtttatgttgcattgcgtttgcatctaaatcacctttagatacagcttcatttggtaatgcgtagtcattgaattcaacgaattgaacgtctaaaccatatttttctttagcgacttttgctgcaatttctgcaacttgatgctcagggccagacatcacgcctactttgattttaagcggtgctgctgcagcttcaggttttttgtcttctttacagcctgttaaaacgagagctgatgcgattgcagtgattgcaaaaagttgttttaatttcataggatttccttcctgtttaagttaagagttgcgtttaattaacgatgatccacttttttagccagtgtatcgccgagtttttggctaatcataacgaatagcacaataataatggttgccacccaagtgacataaggcatattgcgatatacgccgtagttgatagcgaggctacctaaaccaccgccgccttgcgtccccgccattgctgagtaaccaactaaagtgactagagtgagcgtgatgccattaatgagtgtaggtagtgcttctggtaaatagaatttacgtacaatttgccatttagtagcccccattgcttgagcagcttcggttaaaccatttggaatttccattaatgcattagcagttaagcgagccacgaatggcattgcacaaatactcaatggaataattgctgctgttgtacctaatacggttcccacgatgaaacgagttacaggtaataagattagaagcaaaataataaatggaatggaacgcccaatattaataatcgtgtttaacacaaaatgagtgcggttattttgtaagatctcattttttccagttaagaacgtccatacacccacaggcacgccgactagtacagcaagtagggtagatgcaaaactgatatagacagtttcataagttgcggttgcgacaacaccccacatttgaggtgttaattgttggctgaatgttgccaaaaaatcattgaacataaccaagcacctccacgcgcacgttgttttccattaaataaactttggtttgcgtaatggcatcttcatcgccttctacttcagcaatggtataaccaaatttcacgcctccagcataatcaatttgtgaggttaagatactgagctccacgccaaatttttttgatgcttgagaaagtaacggtgcatcgactgagcgacccgtaaactcaaatttgatgattggatacgctttgctgtgtttcggtgtatcagtaagattttccaaatattcatcaggtagactgatgtggaaggtcgaacgaataaactcttgtgctaattctgttttagggtttgcaaaaatttcaccgacagtaccttgttcaactaggcgaccttgatcaataacagcaacttgatcacaaatctgtttaacaacttccatttcatgagtaatcaacaaaattgtaatacctaaagtgcggttaatttcttttaataatttcagaatagattgcgtcgttgcaggatctaatgcgctcgttgcttcatcacataataagactttaggatcgctcgctaaggcgcgagcaatggctacgcgttgtttttgcccacccgaaagattgcttgggtaagcatcacgtttttcacttaaaccaacaagctctaaaagtgcggtaattttttcttggatttttgcttttggttcaccttctaattctaaggataatgccacgttttcaaagacggtgcgagaacttagtaaattgaaatgctgaaaaatcattccaatttgacgacgagcaagtactaactcgcgatcagaaagttttgttaattctacgccatcaacaataacggaaccgcttgtcggtttttctaataagttcacacagcgaattaatgtactttttcctgcaccagatgcaccaattacgccacagatttgacctttttcgatattcaacgaaacattatcaagcgcagtcaattttttgttcggtagcgcaaaaattttcgtaatattatttagcttaatcatataagccctttttatttattgtttttaaatctgttttggtattctagatgtctagattgctatgtcaatatgtcagattatcttttttagacagattagttatgacttatatttgctaattgcttggattaaatagataattttcgtcaatttgacatgtataaaaggttagagaatgaataaggctatttttttagatcgcgatggcacgttaaatattgattatggttatgtacacgaaattgataactttaaatttattgatggtgcgattgatgcattgcgagaattaaagaaaatgggatatatattggtattagtgaccaaccagtcgggcattgcacgtggttatttttctgaggagcagtttttacaattaacagaatggatggattggtcgttagctgaacaagatgtggatttggatggtatttactattgtccacatcatcctgagggaaagggcgaatataaagaagattgtgattgtcggaagcctaaatcgggaatgttattgcaagcgatcaaagaattaaagatcgatcctaggcaatctattatggttggagataaagttgaagacctaaaagcggggattggtgcgaaggtaaaaatgaacgtattagttcgtactggtaaaccagtaacaggggaaggagaaggaatagcggattatgtgttagattctatcgtagatcttccgagaattttaaagtgcttaaaaaaatagccaaaaagatctatattttgctctaatcgcttgcgctttaatcaaaagatcatttttttaaatatttttgtaaaaaagtacttgcaagagatttgaaaatccctataatgcaccgcacacaacgacgcactgttgtgaagttttttaagtttccaannnnncattccattcattaattaattaatgaatgaatgnnnnnccggggataacaggctgataccgcccaagagttcatatcgacggcggtgtttggcacctcgatgtcggctcatcacatcctggggctgaagtaggtcccaagggtatggctgttcgccatttaaagtggtacgcgagctgggtttagaacgtcgtgagacagttcggtccctatctgccgtgggcgtaggagaattggttggggctgctcctagtacgagaggaccggagtggacgcaccactggtgttccggttgtgtcgccagacgcattgccgggtagctaagtgcggaagagataagtgctgaaagcatctaagcacgaaacttgccaagagatgagttctcccaatctaagagatagtaagggttgttgtagactacgacgtagataggtctggtgtgtaagtgtagtgatacattgagctaacagatactaattgcccgagaggcttaactatacaacgctcaagtgtttttgggagctaagtgaagtaagagatgaaaagcgaagcaaataaaagtagagcggaaaccgaagtaaaagactaaacaaagaaaagtaaatatagaagacttaatagaaagaaaatcggattcagcttgtgaccaataagaacgagtgaaaggtagataaagactgagtaacgagcgataaaagagaaaagacgagttatcaaagaattatcctggcggcgatagtgcggtgggcccacctgagaccataccgaactcagaagtgaaacgctgtaatgccgatggtagtgtggggtttccccatgtgagagtagggcaccgccaggttagcaaatacttatctaggttaaataaaaacagaagaaccccgtgtcgaaagatatggggttttagcttttgggaatttactcattatttaatcaaataagagtctaattttaattttcaataagtaagtgatttttcaactcatatgaagtcacattcctataaatgttttattagctgtgctataatcccgctaaaattctacccttaaaaacaagagaaattatgaccgcacttaatgtattaatttatcctgatgatcacttaaaggttgtctgtgagcctgttactgaagttaatgatgcaattcgtaaaattgttgatgatatgtttgatacgatgtatcaagagaaaggtattggtttagctgcacctcaggtggatattttgcaacgtattattactattgatgttgaaggcgataaacagaatcagtttgttttgattaaccctgaaattttggcttcagaaggcgaaacgggaattgaagaggggtgtttatccattccagggttccgtgcgttggttcctcgtaaagaaaaagtgacagtgagagcgttagatcgtgatggtaaagaatttactttagatgctgatggtttgcttgcgatctgtattcaacacgagatcgatcatcttaatggaattttatttgttgattacctttctccacttaaacgccagcgcattaaagaaaagttgattaaatacaagaagcagatttcgaaaagctaaaacgtagggtgggctttagcccatcaatcatttcaaaaaacggtgggcttaagcccaccctacttcctatcaattaccataacgtagaacattatgaaatcacttaatattatttttgctggtacgccagattttgctgcacagcatttacaagccattctaaattctcaacataacgtgatcgctgtttatactcaacctgataaaccagctggtcgcggtaagaaattgcaagcaagtcctgtaaagcaacttgctgagcaaaataacatccgcgtttatcaacctaaatccttacgtaaagaagaagcgcagtctgaactaaaagcgttaaatgcagatgtaatggttgttgtggcttatggattaattttaccgaaagctgtattagatgcccctcgtttgggttgtttgaatgtgcatggttctattcttccacgttggcgaggtgcagcaccaattcagcgttcaatttgggctggcgatgtacaaacgggtgtaaccattatgcaaatggatgaaggtttagatacaggcgatatgttacataaagtctattgtgatattttaccgactgaaacttcaacgagtctttataacaaactggcagagcttgctacatcagcattaatcgatgttttagataatcttgaaaacagtaaatttatagcggaaaaacaagatggcaaccaaagtaattatgcagaaaaactttccaaagaagaggctcaattagattggtcacttcctgcaatgcaacttgagcgtaatatccgcgcttttaatccttggccaattgcctatttttcaacagaagacaaggatggcaatgcacaaactttaaaagtgtatcaagcggaagtgttgcctcatcaagataaaccagcgggaactattttaagtgcggataaaaatggcattcaaattgcgactgtcgatggcgtcttaaacttattgcaattgcaacctgcaggtaaaaagcttatgtctgcacaagatttattaaatggccgtgcagaatggtttactattggtaaggtgcttgcataatgaaaaaattttcttctaaaactatcaaagtaaaaaattcagtaaaaatgaccgcactttcgaccagggctatttcagcaaacttaattttgcaagtattggatgagggcaaatcattgtcagcgttaattccagaagtgcaactttctgtaaaagctcaagatttgcccttgctacaagaaatttgttttggcgtgtgtcgagtattgcctcgcttagagcaaattatcaaacgtgttgtggataagccgcttaaaggtaaaactcgcattgttcattgcctgttacttgtagggttataccaattgctttatatgcgagtgcctgttcatgcggcagttgatgaagttgtgaacgcaacaaaatcattaaaatctgatagttttagaggattagtgaatgcggttttgcgtagatttttacgtgagcaagatgaaattttggcaattatcgataaaaattggcaaacgtttcacccagaatggttcgtgaataaattaaaaaaagcctatccgaattggcgtgagatcattgaggcgaacaatcagaaaccaccaatgtggctacgtgtgaattcacaaaaaaacgccctcgaaacttaccgcactttacttgaggaacaaggtgtttcttcgaaaacaagccatcatcctaatgctctatgtttagatataccgattgctgtgcaaaaattaccgaactttgaagaaggggcggttacggtgcaagatttgagtgctcaatgggcggcaacgttgcttgagccaaaaaatgaggagtggatcctcgatgcttgcgcggcaccaggcggtaaaacgactcatattttagaactggcacctcaagctaatgtggttgcattagatgtagaatctcatcgcttaaaacgagtagaagaaaatcttgcacgtttaaatcagcaagcgatagtggtttgcggcgatgcgagtaaacctgacgaatggttagctaaaatcggtaaaagtgcggcgaaatttgaccgaattttacttgattccccttgttctgcaacgggagtgattcgccgccaccctgatataaaatggttacgcaaagaaaccgatatcgctcagcttgttgaattacagaagaaaattctgagtgcactttgggaaaaacttaagccaaacggtgttttgctttatgcgacttgttctgtattgccagaagaaaattgcgaacaaatccaagcatttttaaatgctcacgcggatgcggagttattgtcattaccttttggtgatgataaaagtgcggtgggttttcaattcattccgcaaccaaatagtggtgatgggttctattatgcgaaattgcttaaacgagcataaaggagagcgataatgaaaattatcattttgggtgcaggtcaggtaggaacgacgcttgcagaaaacttagtcagtgaagataacgatattaccttagtggataatgaatctcctcagttacaaacattgcaagaaaagcacgatttgcgtgtggtacaaggctctccatcatctccaaaagtgcttcgtgacgcaggcgcggcagatgccgatttaatggttgctgtgacagcctctgatgaaatcaatatggtcgcttgccaaatgggctatacattatttaatacgccaacgcgaattgcacgtatccgtaattcagaatatttacgtgaaaaagacaagttgttcaacaatgaaaatattcctattgatcatttaatttcgcctgaaaatcttgtaactgatgaaattacgcgtttaattgcttatccaggcgcattacaagttgcccattttgccaataatcgtattagtattgttgtagtgaaagcttattatgggggggctttggttggatatgcactttcagcatttcgcgaacatatgccacatattgattgtcgcattatgtctattttacgtaacggtaaaccgattcgtccacaaggctcaaccattgtagaagctggcgatgaaatcacgtttatttgtgctactgaacatattaaggcggtaatgggagagttacaacgtttggagaaaccttataagcgagtaatgattgttggtggaggaaatgttgcttctggcgtggcaaaacgtttggaaaattcttgtgttgtaaagcttattgaacgtgattcaaacagagcgcaagccttagcagaaaagttgccaaaaacgttagtatttaatggagatgcctcagaccaaaacttgctttttgaagaacatattgaaagtgtggatgtatttctttcattaagtagcgacgatgaagcgaatattatgtcagcgttgttagctaagcgtttaggcgcgaaaaaagcaatggtactgattcaacggattgcctatattaatcttattcagggaggcacgattgatattgcggtttctccacaacaagtaacgatttctgctttgttaggtcacgtgcgtaaaggcgatgtaaaaaatgtggcaacattacgacatggcattgccgaagccattgaaattgttgcgcacggcgatgcgaatacttcaaacatagtggggcgaaaaattggtgagttgcgtttgccgatgggaacaattattggggctttattgcgagagaatgatgtaattattgctcatcgtcaagtgattattgaagaaggcgatcatatagtgatttatttaagtgataagaaaaatgtgccagaaattgagaaattattccaaccaagtgcattctttatttagtttttttacttttcagcgtgattaattataatagtctctcttttttatgtaatttttaaaggggaacattattatgaattttattaaagaatttcgcgaatttgcaatgcgtggtcatgttgtagatatggctgtcggtgtgattattggtagtgcatttggcaagactgtaagttcacttgttagtgatatttttatgcccgtgttagggattttaactggcagtattgatttcaaagatatgaaatttgtattagcacaagcacaaggcgatgttcctgcagttacgttaaattatggtttgtttattcaaaatgtgattgattttattattattgcttttgcaatttttatgatgatcaaagtaattaataaggtaagaaaaccagaggagaaaaaacctgtgccaaaggcagaaacattgcttactgaaattcgtgatttattaaagaataaataacatttaaaaaataaaagttagcagaaatgctgactttttttattgctatttttttaagctataatcagccctcaattttagggaaataaaatggaaaaatataataaacttcgcattgaatgggattgtcgccgaggaatgttagagttggataaaatcattatgcctttttatttgaagcattttgatgaattaacagatgacaaaaaagatatatttattcgtttattagcaagtacagatctgcagctgttttcttggttttttaatcgtggtaaatcatcagattcagaaattcaatctatggtagaatatatccaaaatgtacaaaaaatcacaactaattaaaattattaagatacgtatgaacttttttcacacgcctgtgtctgagattgcaacaagagcttgctgtcttgaatattaaggcgtgttagatattggcataggagaaatatggctgaacagctaacagatcaggctttggtagaaagagtgcagcaaggggataagaaagccttcaatttgttggtttcgcgttatcagaataaagtggcggggcttttgactcgctatgtatcacgtaacgatattcctgatgtggtgcaagaatcctttataaaagcttatcgctcaattgaatcttttcgtggcgaaagtgctttctatacatggctttatcgaattgccgttaatacggcaaaaaattatttaacggctcaaggtcgccgtccaccaaatgaagatattttggcagaagatgctgaaaattatgatgtgggtacgcacttgcgggatgtggatacacccgaaaatgaaatgttgtctagtgagttagaaagaattgtttttgatactattcataacttaccagaagatttaaaaaccgcgattacgttacgagagctagaaggtttaagttacgaagagattgcagaaattatggattgtcctgttggtacggttcgttcccgaatcttccgagcaagggaaatgatcgaaaataaaattcaacctctaatgtagagcgaataaaaattggagtttactatgcaaaaagagcagctttcagcctatatggatggcgaacaagtcaaaactgacttgacagatgctttattaagagacgaagaattacaagcgtcttggcattcatttcataccgttcgttcagtaatgcgtaaagaaagtgcggtctttttagggggggattttaccgctaaaatggcagatttgattgagttagaagacgtgaagaaagtcgatgtcattgcggtgtctcaacctgaaccagaagatgcacataattctgcatttatgcaaaaattaaaggcattttttgcgccaatgacgcaagttgctgttgctgctggtgtatgtttagtggcagtacttggtgttcaatctttcaatagtaaaaacgaagcgtctaatttaccagaagcaccagtgttgcaaaccttgccatttaataatgcagttcaagaaattagctataatgcaccaagcaaagatacattgacttcagatcagcttgagaaaaaaagtcgtcgcattggcgcaatgttgcaaaactatgaattgcaacgtcgtatgcactctgatgctttaggtgtaagtagcagtcaagtaagataaattggtttcctttgttcagattattgattcaccacctaactgttatttagtgtggtgaatttttatcctttagatttctatgaaaaaaatcgcattaaaatttaccgcactttctctttctttgctattaagtagcattgcttctgctgaagagctttctgcgaagcagtcgttagataaaatgacacaagcattggataatctcaattatgaaattgcctttgtgcaaactactccagcaaatatggattcatttcgttatcgacatatcaaacaagataacaaaacctacgcacaattagtcactttagatggtcgccagcaagaaattattcaacgtgataatttagtcagttattttcagccaaatgctcaagcatttacgcttaatagtggcaatatagttgatgcgatgcctgcggttgtgcgtgcaaattttgataagctttcttcttattatgatttcgtaaaattaggtaaagatcgtgttgctgggcgtttcgctgatacgattagaattgttcctaaagatgattttcggtatcaatatttggtgtttatcgatgaagaaaatggcttgttattacgcggtgatatgcttgatcgcgaaggcaaactacttgatcaatttagagttgtaacactttacatcgatgacagattgagaggattaacggattatattaacaaggtatcattgccccctttattgaaagaaagtaaaaatgaacaaagttcagatataacttggtctgcaggttggttgccacaaggtttttctttaattcgatatactcaagaaatattagaaaatgaaatcatagatagtgcattatatagtgatggcttatttacttttacgttgtttgtctctaatgtaggctctaatgacctaccagaaaatacttggaaacaaggggcttatacgatttatagcgaggtcatcggaggaaaagaaattacttttattgggcaattaccaatctcgacggcaaaacgcattgtacaagaagtcaaatttagataaaaagtgcggtaattttttacgatatttttatcaataactgattgtgagttaggcattgactaagattcgcacgtttttacgtgcgaatttttattttcttaattttattaattctacttggtgattgtgacctttttttagaattagatttgctcgctcacgagttggaagaatattttgattaaggtttaacccgttaatttcatcccaaattttactagcggtggtaatggattcttctttcgataaattggcataatgtttaaagtaagaattaggatcgttgaacgcactttcgcggaatttcagaaatcgtttgatataccattctttcaataatttttcttctgcatcaacataaatagagaaatcaacaaaatctgatacgaatgtctgattggttttattattacccgtttgaagtacattcaagccctctaaaataagaatgtcaggtttatttatcacattaaatttatcaggaataatatcataggttaaatgcgaatagattggtgcttccacctcagttttgccagatttcacatcagctaaaaaatgaataagtttgggcgtatcataagaaatagggaaaccttttttgtgtaaaagatgatctttttttagtttttctaatggatataaaaaaccatcagtagttataagatctactttgcgctccgctggccaatgggaaagaagtgattggagtattcgtgctgaagtgcttttccctaccgctacgctacctgcaatgctaatgatataaggtacttttgttttattacgccctaaaaaacggtgtaaaacagcttgtctgcgaaggttttcgtcaatgtaataattaattaaacgagctaatggtaaataaatcatactgacttcatccaaagatagctcttcattaaaacctaaaagcggtttaagatcttgttctgtaagttttagggggacagatttacgcaattctgcccattgtttgcggttaaaacttaaaaaaggggttagattcattgagatattattgagtcaaatagacaaattggagaaaaatatacgctataaataaaaatttagcattcatttttcattaaatgtgcgctaatttgattaaaaaatcacttttttgattgtgatttaaacgaataatcaaaaaaataaacttttttataaaaaatacttgtcagttaaagttttttccatataatacgcctcacttgcttacgacacgccgacttagctcagtaggtagagcaactgacttgtaatcagtaggtcatcagttcgattccgatagtcggcaccattctttcgtatcaagtattcatttagtgtggaggggttcccgagcggccaaagggggcagactgtaaatctgttggctcagccttcgaaggttcgaatccttctccctccaccatcttttagatggatcctgatgggacagacgaatttaggacttgcgggcatcgtataatggctattaccttagccttccaagctaatgatgcgggttcgattcccgctgcccgctccagacgctgatatagctcagttggtagagcgcacccttggtaagggtgaggtcggcggttcaaatccgcctatcagcaccagtcttataattcctcatccttatatcaatcagcaaataaatttattggttaatgtggtttaatttacccatcgataaccgtgtctatttagagggactatttcaatgtctaaagaaaaatttgaacgtacaaaaccgcacgtaaacgtgggtacaatcggccacgttgaccacggtaaaacaactttaacagcagcaatcacaaccgtattagcaaaacactacggtggtgcagcgcgtgcatttgaccaaattgataacgcgccagaagaaaaagcgcgtggtattaccatcaacacttcacacgttgaatacgatacaccgactcgccactacgcacacgtagactgtccgggacacgccgactatgttaaaaatatgattactggtgcggcacaaatggatggtgctattttagtcgtagcagcaacagatggtcctatgccacaaactcgtgagcacatcttattaggtcgccaagtaggtgttccatacatcatcgtattcttaaacaaatgcgacatggtagatgacgaagagttattagaattagtagaaatggaagttcgtgaacttctatctcaatatgacttcccaggtgacgatacaccaatcgtacgtggttcagcattacaagcgttaaacggcgtagcagaatgggaagaaaaatccttgagttagcaaaccatttagatacttacatcccagaaccagaacgtgcgattgaccannnnncattccattcattaattaattaatgaatgaatgnnnnnaccagaacgtgcgattgaccaaccgttccttcttccaatcgaagatgtattctcaatctcaggtcgtggtactgtagtaacaggtcgtgtagaacgtggtatcatccgtacaggtgatgaagtagaaatcgtcggtatcaaagatacagcgaaaactactgtaactggtgttgaaatgttccgtaaattacttgacgaaggtcgtgcaggtgaaaacatcggtgcattattacgtggaaccaaacgtgaagaaatcgaacgtggtcaagtattagcgaaaccaggttcaatcacaccacacactgacttcgaatcagaagtgtacgtattatcaaaagatgaaggtggtcgtcatactccattcttcaaaggttaccgtccacaattctatttccgtacaacagacgtaactggtactattgaattaccagaaggcgtggaaatggtaatgccaggggataacatcaagatgacagtaagcttaatccacccaattgcgatggatcaaggtttacgtttcgcaatccgtgaaggtggccgtacagtaggtgcaggcgttgttgcgaaaatcatcaaataattgatgaattcttgaatgtcttaaagataaaagacagaagaagtaaaaagaaaagtgcggagaaaattctccgcatttttttattctatatttgataattcgtttaaatatttattaagttaatagattttagataataagtcatttatttgattcctagaacaataaatacattgctccttataaatgacacttctataatttttaattaattggtattaatcaaataaactactatgttatgtccactcaaatttcacttacgctattttttccataagaaattacgtcaaacatacagaatttcccacaaaagtttagaatttatctgcctaatcataggcatagcttgcctgacttggtttacgaaaaaatatactccatatgttggaggaagtggtattccgcaagtattagttgaattcagccaaactatttggaaaattcctcttacctttttggctatgcttatcggtgcatcagttgggcgtattagctgctggttttattcttgtcgcgatttaaggaaacagcccttattttccacgttatcaaggggcaacatcggtttcttatctctatctttggcttgcaatttgtggggtgggttgtggcattctaggtggcatatttggacgattattagcaaaaggtatcgcaggattatcacctgaaaaatggcgtggctgggttcgccaacatcctatttatattgttttattattgggtttagtgcttgccgcactgttggagtggaaatgacaggcgcgcaactcgttctcatttggttcttgatttccagcattattgcatccataatctcgcgccaatttagtcctaaaccattttaccactttgctacaggccgttttcgccagcaaatgcaagctcgtcaagccgaagaattacgcagcaaaaccgaacaagagaaataaaaatgcctcaaaatctaccgcacttttaccgcggccgtttttctgttgcgccaatgttagattggacaacacgctattgtcgttattttcatcgccaattttcaaagcacgcattactttacactgaaatggtcactgcgcctgcgattatccatgccaaatacgatcacttggattttgatttacaagaaaatcccgttgcgttacagctgggaggaagtgatcctgaacaactcaaatattgtgcaaaacttgctgaggaacgaggttatcacgaaattaatcttaatgtaggatgcccttctgatcgcgtacaaaatggaatgtttggcgcttgcttaatggcgaaagcagatttggtggcagactgtgtagaacaaatgcaaagtgcggtcaaaattccagtcactgtgaaaacacgtattggtattgatgaattagacagctatgaatttttatgtgattttattgaaaaagttcaaggaaaaggttgccaagaatttattatccatgcacgaaaagcttggctttcagggttaagtcccaaagaaaatcgagaaattccgccattagattatgctcgtgtgtatcaactaaaacgtgattttccacatctaactatcgcaattaatggcggcataaaaaccattgaagaaatgaaacaacatttgcaatatgtggacggcgtgatggttgggcgagaggcctatcaaaatccaagtttacttgggcaaattgaccaagccttatttgatcctaacgcaccaattgttactgctcatgaagcggtacaatcaatgcttccttatattgaacaacaacttagccaaggagtacaccttaatcatatcgtccgccatatgttaggcgcattccaaaattgcaaaggtgctcgtcaatggcgacgttatttaagcgaaaatgcgtttaaacaaggtgcgggagttgaagtggttgaaaccgccttaagctttgtagaacactaatcacaaaataagccgcaaaagtgcggcttatttttcagctgtttttcttatgcaatacgcatttgaaaaatcaccaattcagcttggcaacagaaagtgaaatctgcctttaataaatagccatcatccagttttgtaatttcagattgaatttcacaaggttcactttctacatcacgcactttctggataaaaaatgcgagcgcttcttgagcttgttcttcactgtcataaatatattcaataacctgactacaatcacgattatcgaaaagtgatttcatatcaaatgtgttacaacctacacattcaatcggtttttcagtttgaattgccataatattatccttttattcagattattttgcagcgacaaaacccacagcttcatacactttcgccaaggtttcttgtgcttttgcacgagctttttccgcaccttgtcgtaagatattatctaataaagtttcatcattacgatattgatggaaacgttcttgtaaaccagcaagtaaagttgagacttcatccgctactgcagtttttaaatgtccgtacattttaccttcaaattctttttcaagatcagcaattggcttatccgtaaccgcagaaagaatatctaaaagattagatacccccgctttattttgcacatcataacgaacaacaggcggctcatctgaatctgttacggcacgtttaattttcttcgccacagattttggatcttctaaaagtgtcaccacgttgttgcggttatcatctgattttgacattttcttttcgggatcttgcaatgacataatacgcgcgcctgcttttccaatgaaaatttcaggaatagtgaaaatattgccataaagcgcattaaagcggtttgcaatatcacgcgtaatttctaagtgttgtttttggtcatcgccaacaggcacgctttttgcttgataaagtaaaatatccgccgccattaacacaggataatcaaacaaacccacgttaatattttctgcataacgcgctgatttatctttaaattgcgtcattcggctcatttcaccgaaataggtgtaacagtttaacacccagcttaattgcgtgtgttctggaacgtgagattgaacaaaaatagtacttttatttggatcaattccgcacgctaaataaagtgcaagcacatcaagggttgctttgcgaagggcaacaggatcttgacgaacagtgatcgcatgtaaatcaactacgcaaaaaatacattcataatcttcttgcattttcacccagttgcgcaacgcacccaaataatttccgatagttaattcaccagaaggctgtacgccactaaaaacaattggttttgccataatcaatccttaataccttaaaactgttcacacatcatatcagaaactctaggcttttttaatgttcgagttcaaaagctaggttaaaaatgctatatttaacggaaacgttttccctaatatttactaatgaaaaactaccacgatattgttcttgcccttgctggcgtgtgccaatcagcaaaattggttcatcaacttgcaacagaaagtcgagcagattcagagacatttttaaccgcacttaatagccttttcattacccagcctcaacgaattgaagatgtttttggtggcgaagttcgtcatttaaaattaggtctagaaaccttaattcatcagctcaacgcgcaaggcgatcaaaatttaactcgctattggctaagccttttagcattagaaggaaaattatcgaaaaatcccgatgccaaacaaacattaggcaatcgaatttctcgcctaaaagaacaagaaattcattacgctcgtgatagtgaaacaatgctatctattatggcaaatatttacagcgatattattagcccattgggcaaaaaaattcacatcctaggctcgcctgattatttgcgacaagaactcgtgcaaaataaaatccgtgcagttttacttgcaggcattcgctctgccgtgctgtggaaacaaatgggcggaacaaaatggcaaattttatttttccgcagaaaattacttgctaccgcaaaacagatttattcttctatttattaatacaattctggagcaaacatttatgcaactctctacactgaccgcgctttcccctcttgatggtcgttatcaagataaagtaacgccattacgtgctatttttagcgaattcgggttaatgaaattccgtgtagctgtggaagttcgttggttacaaaaattagcttcaacggcagacattaccgaagtaccgccattttctacgcaagcaaatgcttttttagatggaattgtggctaattttaatgaggccgatgctgcgcgtattaaagaaattgaacgcacaaccaatcacgatgtaaaggccgttgaatattttctgaaagagaaaattcaaaatgaagtggaactagtgaaggtttccgaatttattcacttcgcttgcacctcagaagacattaacaatctctctcacgcattaatgttaagcaccgctcgtgacgaagtgattttacctgaatggcaaaaactgattgatgaaatcactcgtcttgcagaagaatataaaacgattccattactttctcgcacacatggccagccagcttcaccaagcaccgtgggcaaagaaatggcgaatgtcgtttatcgcctaaaacgtcaatttaaacaactccaaaacgcggaaatcttaggtaaaatcaatggtgcagtaggtaactacaatgcgcatttatcggcatatcctaatattgattggcataaattcagcgaagaatttgtcacttcattaggtattcaatggaatccttataccactcaaattgaaccgcacgattacatcgctgaattttttgatgctgtagttcgctttaataccattatcattgattttgatcgggatttatggggatacattgcattaaatcactttaaacaacgaacgattgcaggcgaaattggttcttcaaccatgccacataaagtcaatccaattgattttgaaaactcagagggcaatctaggattagccaatgcagtgatgacccatttaggtcaaaaattaccaatttctcgctggcagcgtgacttaacagattcaactgtattacgtaatttaggcgtaggattaggttattgtttgatcgcttatgcttcaacacgcaaaggcatcagtaaacttgaagtaaatcaaccgcacttattagaagaactcaatcaaaactgggaagttttggctgaacctattcaaaccgtaatgcgccgctatggaatagaaaaaccttacgaaaaattaaaagaattaacgcgaggtaaacgagtgacagaacaggctatgcgtgaatttattgataagttggatattccacaagaagaaaaattacgtttacaaaaattaacacctgctacttatattggggctgcagtggaattagtagaaaaactatcataggaatttggctcttttttcaacaatattctttacaagaacatagcttttctctataatcctgcgcctgtgttagtcaatctaacaaatttctggttggtgcttgacctattcaagccccatccaagaccgtaggggagtaatcttaattatcctacgtagatggtgaacagaataagaatttttcttgcttctgggcgccgaagtcatcctaatcttaggattaggtaaattaattccgagtaatcggagtgtattcaggagctaaaagccaatggcattaaatcttcaagacaaacaagcaattgttgctgaagtaaatgaagcagccaaaggtgcactttcagcagtaattgcggattctcgcggtgtaactgttgagaaaatgactgaattacgtaaatcagcacgtgaagctggcgttacaatgcgtgtagttcgtaatactttattacgtcgcgcagttgaaggcacagattacgaatgcttaaaagatacgtttgtaggtccaacacttatcgcgttctctaacgaacacccgggcgcagctgctcgtttgttcaaagagtttgctaaagcaaacgataagtttgaaattaaaggtgcagcctttgaaggtaaaatccaagatgttgaattcttggcaacattaccaacttacgaagaagcgattgcacgtttaatgggcacaatgaaagaagctgcagcaggcaaacttgctcgcaccttcgcggcattacgcgacaaattacaagaagcagcttaatcattaagcgtttcttacttcatctaactttatttattttaggaattgattgttatgtcattaactaacgaacaaatcattgaagcgattgcttcaaaaactgtaactgaaatcgttgaattaatcgcagcgatggaagaaaaattcggtgtttcagcagcggcagcagtagcagcagctccagcagcaggcggcgcagcggcagcagaagaaaaaactgaattcgacgttgtacttaaatctgcaggtgcgaacaaagtagcagtaattaaagcagtacgtggtgcaactggtttaggcttaaaagaagctaaagatttagttgaatctgctccagctaacttaaaagaaggcgtttctaaagaagaagctgaagcacttaagaaagaattagaagaagcgggtgcagaagtagaagttaaataatttctattttaaccactttaaaattcaaaaaaaccgatggggaaaccatcggttttttcttatataaaagtttgttatagcttttacttaaaaacttatcatttgctatctttctaagatagaatattacccgtttttattgatgaataaagagaaaatttatgacaaaaaaagcattaagtgcggtaattttagcagctggaaaaggaacgcgcatgtattccgatttacctaaagttctacatacaattgcgggtaaaccaatggtaaaacatgtaattgatactgcccatcaattaggcgcagaaaatattcatttaatctatggtcacggtggggacttaatgcgtacccatcttgcgaatgaacaagtaaattgggtattacaaacagaacaacttggcacagcacatgcagttcaacaagcagctcctttttttaaggataacgaaaacattgttgtactttacggcgatgcaccattaataacgaaagaaacattagaaaaattaattgaagagaaaccagaaaatggcattgcattgcttaccgtaaatttagataacccaacaggctatggacgaattatccgtgaaaatgggaacgttgtagccattgtagaacaaaaagatgcaaatgcagatcaactaaatattaaagaagtaaatactggcgttatggtatctgatggtgcaagtttcaaaaaatggctcgctcgtgtaggcaataataatgctcaaggcgaatattacttaacggatcttattgctctcgcaaaccaagataattgccaagttgttgctgtacaagcaatagatgtcatggaagttgaaggcgcaaataatcgcttacaattagccgcacttgaacgttatttccaaaataaacaagcctccaaattattacttgaaggcgtaatgatctacgatcccgctcgttttgacctacgtggagcattagagcatggaaaagatgtggaaatcgatgttaatgttattatcgaaggtaatgttaaactcggtgatcgcgtaaaaattggcgcaggttgcgtattgaaaaatgttgttattggcaatgatgtagaactaaaaccctattcagtgctagaggattctatagtaggagaaaaagccgcaattggtccattttctcgtttacgcccaggtgcaaaacttgcagctgaaacgcatgtcggtaactttgtagaaattaaaaaatctaccgttggtaaaggttctaaagtaaatcatctaacttatgttggcgattcagaaattggctcaaattgtaatattggagcaggtgtcataacctgtaactacgatggcgcaaataaatttaaaacgatcatcggtaatgatgtatttgtgggatctgatacacaattagttgcgccagtgaaagtcgcaaatggtgcaactattggtgctgggactacaattacacgtgatgttggcgaaaatgaattagtgattacaagagttgctcaacgacatattcaaggttggcaacgaccaataaagaaaaaataaaatagaataaaaaatcctacgtattatcgtaggatttttttataaaccaattttacaaatcgtaattaaaatcacataaaaaatgaccgcacttaatgttaataatttatttgctagtttaggtttatgttgatgaagacggtatagcattctagctgtaacagctagaataaagggataaacccaaaaaagcgttgaaaataaattgatttgccaacttgatagatagggatttttactaaatgctgtagaaattaataatgccattggacacaataatataggcgaacaaaaggcagcaagaccccaagcaaatggactaaatttagttggtaaagattgttttttcatattttaaataattaaaaataaatagatacaagaaagaaatataataaatatgttgaatagtaaagaatattttaatgaaagtaacaatgtagaaatggcgcacccgaaaggattcgaacctttgaccgctcggttcgtagccgagtactctatccagctgagctacgggtgcgtagatgatgctttaattattcataaccactttaataagatagagtcgttttaaaaatggcgcacccgagaggattcgaacctctgaccgctcggttcgtagccgagtactctatccagctgagctacgggtgcagaataaataaaacaaacaatggcggtgagagagggattcgaaccctcgatggagcttttaaccccatactcccttagcaggggagcgccttcagcctgctcggccatctcaccacaatcagtgtgagcggtataatacgttttttagaaaatatgtcaaaccattttttgaaaaacacacctgtttgaatattttatctacacattaaatctatttttgagtgaaaagctactaattatttaaaaattctaacattttaaagattgttttctttcttaatttgtcctgttcaaatagaatttcgtgtttagcattgaatacaacttcacatctagcattcggaaaaagtgcggttaatttttcaagattgttgttatctactattttttctttttcggcttgtaaaattaggattggaatttcaatcttaggaataactttcggcaagcgtttaattgcgttcaaacataaatgtacccaacggaatgttggcccgccaagattaattgctggatttttacgatttacacgattcatccatttcattctggttttacagaaagttaattcattgtattccaagtgggcttgttgataaggccctttaccaaaaacataacgctcgccttgtcctaaaatattcattagggtaataatcagttcatctctaattggatgttttaaaagaataccgtaaaaaggcgaagaaagtaccgctttattaatgtgatgatcataatttgccaaataataggttgcaatcaatgcgcccatcgaatgagcaagcaaatgctgcgttgaatagctgaaaagtgcggttactttttcgatgattttcgccatatcatcgacatagaaacgaaattcatctaaatgccctttttgaggaataatacgctgtgaatagccttgaccgcgatgatcaaatagcaatacatcgtaaccttgatgataaaaatcataagcgagctctgaccatttcagcatattttctgctcgaccatttactaaaatcatcaattttctgaccgcactttcagattgaatcaaatgacgataagctaattttatatttcgtttaccagaaagatattgggtaggaaattgctcaaaaaaaggcaataattctgcaagagcaaattgatgaaaataaggttctctgatcataattttttaatgaaaagggcgtagtaaataccccctttgtagtgaaagtaaaatttatgccactaattgttttaagatacggcgaactggctctgccgcaccccataataattggtcacccacggtaaaagctgccaaatattcaggccccatagccaatttacgtaaacgccccactggcacgcttaatgtacctgttactttcgctggcgttaattcacgtaatgtggtttctttgtcatttggaattacttttacccattcattatgtgatgcaataatttgttcgatttcttctaatggtaagtcttttttcaatttaatggtaaacgcttggctgtggcaacgtaatgcaccgatacgcacacataaaccatcaacaggaattggattgtcgcttaaacctaaaattttgttggtttctgcataacctttccattcttctttagtttgccctgtttcaggaagaagtttgtcaatccaagggattaagctaccgcccaatgccgcgccaaagttatctgttgggaagttatcagcacgcatttttgcagtcactttacgttcaatatctaaaatagatgaagctgggtcttttaattcacttgaaactgcttgttctaataaacccatttgtgaaagtaattcacgcatattttttgcgccagcacctgaagccgcttgataagttgccacagaaatccattccactaaatctttttcaaatagaccgccgatagccattaacattaagctcacggtacagttaccgcctacgaaagttttaataccttttttcaagccttcagaaatcacgtgttggtttactggatcaagcacaataattgcatcatctttcatacgcaacgcagaagcggcatcaacccaataaccatcccagcctgttgtttttaattttggatagacttcattggtgtaatcgccaccttggcaagtcacgataatgtctaattttttaagttcttcaatatcgaatgcacttttcaggtcgcctgcatccttgccaccaaaaacaggtgctttttgacctgcttgtgaagttgtaaaaaatacgggattaagattttcaaaatcattttcctgcgacatacgatccattaatacggaacccaccattccgcgccagccgataaagcctacatttttcattgttgtttccttagtttgttgtgcttgaatagcattattaattacaagatagcgttagcaaaatcaagtatttttaatgaaaattgatcttttgtgaaagaaattaaataaaaaataaaaaagtgtggttaatttaaaagaaaatttaatttaatcactctttttctagttatctacttcaacacttattacgccatcttctgctttaagtaaagcatacgcatctttcaacattgtggaatcaatggaaaagcaacgaatttgtaaccgcacttctccactactttgatctttgacttgtatatgttcaatacgatactgattatttactaacaattgggtaactttccctatgctttccgcatcattgacaagaatattgaatttcgtccgacgacgttgtgatttacgatgaacccaacgttgaaccaacggacttaatcgaatagacaccaaaatcatcacagtggcgatgaccgcatcaaacacgaaacccgccccagcagcaataccgatccccgcagaagcccaaataatcgccgcagtggttaaacctgaaatcgcatcatttttcttatgcaaaatcacaccagcacctaaaaaaccgatgccactaatcacttgagccgcaaggcgcatcggatccgtacgaatattttctgaaacttgtgcataatgctctgcggcttgaattgaaacaatggttagcacacaagtggtaacggcaataatggcacaagtttttacacccacaggcttacgtttaagttcacgttctaagccaataacactgccaagcaccatcgctaatagcattttgctaaaaataattaagtgatcaggattgaaaagtgcggttaaaagtaaagatgaattttccataatgataaaaataagtcagacatactcgtctattctacatcacttagcttaaaatctttacccttccaagcctttaatttatcgcctttcttgcgaaaattgagtagaatcttgcgtttgaaattttatagagcgaaagaacggttattttatgcaaaattcaaccccaagcattggctttgtaagccttggctgcccaaaaaacttggcatttgggttcgcttacattatgtgtatccctatccccatgtggatgatttaattccattaatggcagacggcacgctcttgccgtatttagacattccattacaacacgccagccctaaaatcttaaaagcaatgaaaagaccaggcagtattgaccgcactttagaacgcattaaacaatggcgtgaaatttgcccagatttaacattgcgctccacctttattgttggtttccctggcgaaacggaagaagatttccaattattactcgatttcttaaaagaagcccaacttgatcgcgtaggctgtttcaaattcagtcctgttgaaggtgcacacgcaacagatatggctgaccaagtaccagaagatgtgaaagaagaacgtttccatcgcttcatgcaattacaacaagaaatttctgcaaaccgtttaaaacaaaaaattggtaaaacccttgatgtattagtggatgaaattgacgaagatggtattattggtcgctccaaagcagatgcccctgaagtagatgggttagtttacgtagataatttaagcggaatcaatgtcaaagtcggtgacgtgattaaagtaaccatcacaaattctgatgaatatgatttgtggggcagttgttaaataacaacaatcttaacgaaataaacaaaaaatccatcttcgtattgaagatggatttttttattagccgaacactttttccaaatgtgcttggtagtctgctaagtattgttctacttgaggatttttaaccacatcattacataagaatgtcggcaggcgagtcaaaccgaggaactcgttgagtttgtggaaatgcatatacaaaacatccacgcctttgccttcaaagaaatcgccttcgcgagtaaaggtttcaatcggtgcattccaagtcagtgaaagcatgtgttttttgccttgcaacaagccgcctgtgccatagccctcggttggattaacgctgtgtctgccatcactgtgatataacttgccgtgcccactggttaatacttcgtctatgtattttttcactgtccaaggctcatgcatccaccagcccggcatttgccaaatcacggcatccatccacaagaatttttcgatttcagcttcaacgtcataaccagcatcaattacagtttctttgacattgtgtccaagtgcggtcaaaacttctttcgcttttttgtgaagcgtgtggttcaactcgccgtgagaatgaccaaacgccttaccgccgtctaataataaaatattcatctttttgctcctaaaataaataattataaaaaatggggctgccattatgcctttttacgttaatttttaaaagtatatttgtctgccacgttatttctagactataaggaagattacagcccgtagggaataaaccctagttaaacgcgtgggcttaagcccaccctacattggctacattagctggaattgaaagtgcggtaaaaaattggtggaaatcaaacgaaaaatgaccgcactttcagaataaaaaaatcgacagagaatttccctgccgatttttattaacttttcaaaatcgccctcaatctatcaagctggttttgtgttttttcttgtttttgctcggtggttagttttggtttatcgcgttcccatagcacatcgtcattaggtaattcagctaaaaatcggcttggttctgggcgaactaattcgccatattgacggcgttctcgacacaaggaaaaagtaagttctttttgtgctcttgtgatacccacataagccaagcggcgttcttcttccacgttgtcttcatcaatgctagtttggtggggcaaaatgccctcttccataccgatcaaataaacataaggaaattccaatcctttagatgcgtgcaatgtcatcagttgaacttgatcgctgtcgtcatcgtcttcgccttcgcctcgctccaacatatctcgtaatgttaggcgggttaccacttgattaaggttcattggttcattggtttcatcgccttttaacatatccgcaacccagtcaaataacgtggcgacattcttactttgcatttctgccgctttagggcttgttgcgtattcgtacaaatattcttcataatgaatcgtggataacatagaacgtaccgctcgctctggttcagaacgttgaatttcatcattaagttctacaatccaacggccaaatttttgcaatgaatcataggcttttggtgtgatgcgttggataagttcaaactcaaaaatagcctcaaataaactgatgtgtttttcttgagccaactctccaagtttttgtaacgtcgcggtgccaatttcacgtttcggtgtattcacaatacgcaggaatgcggcatcatcatcttgattcaccaccaagcgcaagtacgccatcatatctttgatttctgcacgggagaaaaaagaagtaccacccgaaattttgtaaggaatacggttttgcatcagtactttttcgagtaatcgagattgatgattgcctcgatacaaaatcgcataatctttatatttggttttacggctaaaacgatgggcgatcaactcagcgacaatccgctctgcttcgtgttcttcattttttgcttcgataataagcaatttttccccttcgccaatggttgaaaagagtttcttatcaaacacgtggtcattgttatcaatcaaaatattggcacaatgcagaatgcgttgggttgaacgataattttgctctagcttaatcacgttcaaacgagggaaatcatcgcgtaaacgcaccatattttctggtcgtgcgccacgccacgaataaatagattggtcatcatcgcccaccacagtaaaacaagcacgatcccccactaaaagtttaatcagttcatattggctggtgttagtgtcttgatattcatccaccaacaaataacgaatttttgcctgccattttgaccgcacttcttcatttcgcttgaacaacaacgtcggcagcataatcaaatcatcaaaatcaagtgcgttgtaggctcgaatttgtgtggcgtaacgctcataacattttgcaaaagtttgatattttgcatcacgtgccaacgcaaacgcctgttttggcgaaatcaaatcattcttccagttagaaatcactgaaattaactcacgcaataaatccttatcttcttttaacacatcagcggttagctcttttaacaacgcaaattgatcctgttcatcaaacaaggtcatatttgatttaaagcccaacgctttatattcacgcttaataatgtcaaaaccgagggtatgaaaagtggaaacgagcaagcctttagattgctctttgccaatggaatgtgccacacgctctttcatctcacgtgcggctttgttagtgaaagtaacagcagcaatttgtttcggagaataaccgcactttccaattaaatgggctattttattaatgattacgcgagttttgccagagcctgcgccagcaagcacaagacaagggcctgttacatattcaacggcttgttgttgttgaggattgagtttcataaaaattattgagcccacgcatagggcagtaacacggtgtctaataaaaatgagaggggcaaatctaagattgggaatccccattgttgggccatttcaagatcataagccgcccctgcataggcggtatatttttctgttggatcgataagtttgaccacggaaccacaaccagacaaaacgataagtgcggttaaaaaaataaaggtttttatcatcgtgcttttaacgcattgaatactggcacaggaactagctcagcgacatctccgccatgcaaataaatttcacgcacaatagtggaagaaacaaacgcccatttttctgctggtgggaaaaacaagctctctacgccttttgtgagtaaacgattaagggcagctaattgaagttcatattcaaaatcggttgtcgtgcgtacgccacgaataatggcagaaatattgtgctgcttaatcacatttgccaacaaatcagaaaagccaaacacctccacattggataaatgcgtaacagattgacgaacaagctccacgcgttcctccaaagaaaatagcgtttttttgcttggactatttgccaccgccactaaaacacgaggaaaaattaccgcacttctttcaataatgtctaaatgaccgtttgtaatcgggtcaaaagtgccaggataaatcacgctcgtcatacattacgctccaaataaggttttaataaatctaacaaacgctgtaatgcaccacggttttccatcagcacttcatagccagcattgcctaaacgttcgctagcctcttttgaatttaataaggcttctaccgcacgttccaaagcatctgcggttgaattaacttccaacacaccttgcacttccaccaacattctaaatatctcagggaaattaaaagtatgcttgccagtaatcactggcattttaaacgcaagaggttccagtggattgtgtcccccgtgtttcacaaggcttccccccacaaaagcaatatcagaaacgccatacatcaacataagttcgcccatactatcgcccaaaattacttgggtattttcatttggtaactcatttgtagaacggcgaataaattggaatttttcctttttgagtaaatcagccaccatattaaaacgctctggatggcgaggaacgagcaataacaataaatttgggtattttgctaacaaagcgcggtgagattttaaaatgatttcatcttctccgttatgcgtactcgctgcaatccaaatcggacgattttttacccaaagagatcgtaaatcatcaatcttttcacgtaattcatcagtgatcgagagatcatatttaatattgcccgtgatattcaatttttcctttggatagcccaaagtggcatagcgttttccgctaatatgatcttgtgctgcaatcaagctaatttgcgaccacattgtttgtaagcgcgcttttatttttccgtaacgatgtgcagaacgtgcggataaacgagcattagcgatgacaaatgggatattgcgtaaaaataattgatgaataagattaggccaaagttctgtttccatcacgatacataatttaggttgtacaaaattaataaaacgatggatcgaaaaaggcaaatcaaaggggagataataatgaaaaacactgtctccaaaagtggctttgacgcgctctgaacctgttggcgtaaaagtcgtaaaagtaatggataaatgtggataatcttgttgcaattgacgaaccagcggtgtcgcagcaatcacttcccctacggaggctgcgtggataaagatcccttgtagtggtgggcaagacgcattgccataaaaaccataacgttcagccaaacgctgacgataacgtggggatttaacactgagcaagccaataaaacacaatatcaacggctggcaaattaaaagcaagctggtataaaaaaaacgccacataaatgaaattcggttatacttaaaaaaatttcggctagtatagcaaaaaaaggattgaaaatatgcctacaattagcgttgcaatgattgtaaaaaatgaagcacaagacctcgccaattgcttagataccgtaaaagattgggtggatgagattatcattctagattctggtagcacagataacactaaagaaattgcgctcagttatggggcgaaattctatgaaaatagcgactggcaaggctttggtaaacaacgccaattagcccaacaatatgtaactagtgattatgtactctggttagatgctgacgaacgcgttacgcccaagttacaacaggctatcttaaatgcggttaaaaatgatcgagaaaataccgtttatgaaattccacgagtgagtgaagtatttgggcgtgaaattcgccattcaggctggtatcccgattatgtagttcgtctctatcgcacaaactatgcgcaatataatgattcacttgtacatgaaaaagtggaatttccagctggcacaaaagtagaaaaattgacaggggatttagagcatttcacttataaaagtatccatcattatctagtgaaatccgcaggttatgccaaagcctgggcagaccaacgccaagctaaaggaaaaaaagccacactttggcaaggaatttcgcacgcgcttggttgttttgtgaagatgtatttgttaaaagcgggttttttagatggcaaacaaggatttttattagcggtgttatcagcgcattcaacctttgtaaaatacgccgatttatgggagcgcgatcagcataaacactagcgagttttgcaaggacaatcatttaaatgatcgtccaccagccccatagattgcataaacgcatagcacgtggtttcgccaacaaagacgaaaccacgtttttttaaggctttagaaagtgctttcgatacttctgttttagttggcacagatcgcaaatcaggcacatcattgacaatcggtttatgattcacaaatgaccaaataaaatcactgaaattttcaccgcacttttccatcgccaaataagctttcgcatttttgacaatggcttctaacttggctcgatggcgaattaatcctgaattttgcatgcaagcatcaatatcaagtgcggtcatttttgcgatttttttcggatcaaattgatgaaaagcctcacggtaagattcacgttttttcaaaaccgtaatccacgaaagccccgcttgctgcccttccaaacaaattttttcaaatagcttttggctgtcgaattcaggctttccccattccttgtcatgataatcaatataaataggttgttcgccaacccaagggcatctggttatttgttgcatattaaaacttgacaaaataaaacattttgatatattccgagcccggtggatcgagggtgcttggtcggcgttatagcttcagtgagtttcattgaggcttttcgctttttagggctaaggaaatagatgaaatacgttccataaaaccttcacgctgttcacgagaagtgaaaatattaaaatcgctgtatttattttccattgccaattaccttattttaattgctcataaaccgagacaaaatctggcattacgcctcgccataaatggaaagaatgtgctgcttgcgcgactaacattccaaagccatcgctaacgttggttaaacccaaacttttgcataatgcaataaatggcgtgtctgtgcctttcgcatattgcatatcgtaaaaagctgcgcctaattttaaaatttcagcatcaactgaagccgttccaccacttaatccagcggaagttgcattaatcaccaaatcataagtttgtagcggaatcgaatccatagagacagcttgaatattgccgtaaggctgaaatctttcagctaattctttggctttcgaaaaagtgcggttagcaagcacaatattttgttgagcttgtaaaagtggcaataatacgccttttgttgctccgcccgcccccaagattaatacacgctgatttgggtgaagccaatttaaacgttgtaaatcagtcactaaaccaatcccatcagtgttatccgcataaagttttccatcatcgagtttttttagcgtattacaggcttccgccaattttgctcgttggctatattcgtctgccagctgataagctcgttctttaaaaggcgaagtaatattgcaacctttcgcgccctcatcgaaaaatgccaaaagctggtgttcaaaagtatcaagatcacctaattttgcaatgtattctatggtttgatgggtttgcgttgctaacttattttgaattaatggcgatttactttgcgtaatcggattgccccatacagcataaagatccataaattatccctgtctaaaaagttgatttgtacgcaagtnnnnncattccattcattaattaattaatgaatgaatgnnnnnaccgaattgtaaccgcacttcatcggcggtacggcaaggtggctctcctgttaggtttgcactcgttgaagttaatgcaaaacccgtgatttcacacaaggctttcacagatgggtgatcgcacaaacgtattgcaatgctatcaaatttgcctgtgagaaaatgcggggtggtggatttagctggcacaatccaagtcgttgggcgttcatatttaccttgcagatgagaaagctgttcatcgttaatctgctcaaaatcgacaaaaggacggaaaaaatccaagctaggtgccactaaaatcagccctttttccactggacgttgctttaaatcaagtaatttttttaccgcactttcactttgcggattacagcctaaaccaaacacagcttcagtgggataagcaaccacttgattttgtcgaagagcatcggcgatttgttctctattcatttcattcttttacttttattgctcaaaaatatgacggcaagttttatttgcacactggaaaatttgtttttccccatcttcgctttttaacaaagaaagtggaaaatggcaggttgggcaaggcacggcataaggcttggcaggcaaagaaaatttacatttagggaaattatcacagccgtaaaaaatttttccttggcgacctcgacgagaaatcaaatgccccgttttacattcaggacaagtaattttttcctcagattcagattcttcccgcaccacaaaatcgcattcaggataatggctacaaccaataaacatcccaaaactgccttgtttcaactgcaataaattaccgcacttcgggcaaatttcatcaagtgtttttaatactttatgctccgatcgttgcaaaggacgcaaataatcacattcaggataagcagagcaacctaaaaacagcccttttttgccttgtttaatttgcaaaagcgcaccacattgagggcaatattcctgttgtttgctatgatgaaaaaggctttgattcataatctatccttatgcttgaagcatttcttccaattcttcctgtgcggtcatccattccgtttctacatcatctaatgctttcttcacatccacttgttgagccaaaagtgcggtcaatttttctttattttccgcattatataattcagcatcagccagttgattttctatgttcgcaagctcagaagaaaatttattcattttttcttctaattgcgtgatttttttacgtaatggtgcagtttgttggcgtaactctgcttcacggcgtttttgttccttacgattttgaaccgaattttcattatcgcccactttttctgaaactttattttcaggcgtgctattttgctcactcagccatttttgatagtcttctaaatcgcctttaaattcttccacttttttatcgtgaactaaataaaattcttccacggtattgcgtaataaatgacgatcgtgcgacaccaccaccaaagaaccttcgtaatccaccaacgcttccgttaatgcttgacgcatatccaaatccaaatggttagtcggttcatcaagtagtaataaattcgggcgttgccaaacaatcaaagccaacaccaaacgagctttttctcctccagaaaaagattgcactgcttgatttactttatcgccgtggaacgcaaaactgcctaaataatcccgaacttgttgctccgtttgctcaggcgcgagtttttgcatatgccacagagcagattcgtctgcgcgtaaagtatctaattgatgctgagcaaaatagccaagttgaacaccttttgccaactgcactgtgcctgaaagtgcggtcagttctcccgctaaaagtttaattaaggttgattttcccgcaccatttttcccgagtaaaccaatgcgcgaacctggcactaaattcagtttaattttacttaaaatttctaccgcactttctccgctaccataacctgcactcgcttgctcaatcatcactaagggattcggcaaggattgcggtggacgaaattcaaaagtaaaaggattatccacataagcaggcgcaatcagctccattctttctagtgctttcatacggctttgtgcctgtttggctttggtcgctttggctttaaagcgatcaatatatttttgtaaatgggaaatcttttgttgttgctgacgatacatcgctgtttgttgtgccagtttagtggctcgttgcacttcaaaggaagaataatcgcccgtgtattcgttgagcttttgattttcgatatgaaggatttttgtcacaattggatcgagaaaatcacggtcgtgagaaattaataccaaagtaccttgatattgcactaaccaacgttctaaccaaataaccgcatccaaatccaaatggttggtcggttcatccagtaacaataaatccgatggacaaagcaatgcctgtgccaaattcaaacgcatccgccaaccgcccgaaaaggctttcactggctgtattgtttcttcttggctaaatcctaaaccatgcaataaagaagcggcacgcgattgaattgtccacgcatccaaggtttctaattgctcatgaatgcgcgcaatagcgttaccgtcattgcgttcatttgcacgttcaagctcttgctgcaaacggcaatattcacgatccccttgaatcacataatcaatcgcagaaatatccaatgcaggcgtttcttgattcacccaagatacccgccaatttgctggataattcacctcaccgccctctggcattaattctttttttaataaggcaaaaagtgaagattttccacaaccattcttccccaccaaaccgactttttgcttggggttaatcgtagcagacgcattttcgagaagttccgtttgccctcgttttaaagataagttactaaatataatcatttttctacataggtcttaatttgaggctattttgcaatattttttcttttctcggaacagtctattccgattttatcgattttctagtcaaaaaagccacgtataataagacgcaataaaaactatttataatataacaagtcaaacgggtatatcttaggcattttttacccttagaggaacaatcgacagggttttccctaaaggagcgagcaattttaacaacgtttcaagctgaggattcgtttgtcctttttcaatgcgtgcaatcataggttgcttcacaccgcttaaggtttcaagttgtttttgggaaatcccaagttgctggcgagaagtaatcaattctttaattaaggctacacgcaaattactttctcggatttcttcttcattgaaaatttgctgttcaaactcattccaatttgaacctaatgggctgattttattcatttttcaatctctcttttaattcacttaagcgttgttgggctgtttggatttctcgttttggcgttttttgtgttttcttcataaattgatgtagtaagacaaagcgaccatccattaatcttgcaaacaagatgcgatccctaattggacgaagttcccaaatttcaccgtctaaatgtttcacatagggtttgccaacagacgtcccgagttcgcttaataactttacataatctcgaattttattcagtttaattcgactatctttgctttcattttgagccagagatagcagatactctttcactggctcaatgtcattttggtctctgtaaaggagaatctcgtacataatttatcctatttatctacttatttcaataactaataggttattgatttttgatgtgtaatcataaatagaaactaaaaatttggcgagatagtcatttcaatctttcgatctagatcgcaaaaatagcgaaaatagcttgattttcaaggagattttgcacaaatgccgatgtttgaacattggctttgaaagagagagtaaaagatagatcctttcttatgaaaaagtgcggtaaaaatttaccgcacttttgattttagataggtttaaaattcaaactgaactgacattttataatttctacctggtgcgtagaaacggttaatgcctaatcctgttgattgttctataacattacttgtaccaaatgaacgaattgaacgcgcagaatcccaagtaatgtatttacggtttgtaagattatatacaccagctcttatggttaaatttttaattggttgcacatatccaattaaatctagaatagtataagatttgcttctccattttatgctagtgtcggtttgttttttatctttcgcataaatatcataggtatcttctggatttttacttgctacatgtgtcgtatagaaatcgaaaccaaatttatgatttggatgatcatatcctaaaccatataccatagttctaggctgaatcgcattcataggaatattgccattcattctgcctttttgataggtatatttatagcttaggttaaatccatccataaattttgccattttaccaaggaatacttttgaattaatttcaataccttttaaagacgcattatctctatttatattttgataaagagaaaatggtaatgagctacctccgctaactaaagggaaatctttttcccctttaaatattaggtcaataaagtttttatagttagttttaaacagacttgtcgagataaatccccaatcatcattatgtaatgtgaaagcaatttctttggtttttgctatttctggttttaaatcagtatttggcaaaatagtgaaatcagggtgtttaaaggtgaaatacatttcatctgaagttggtgttctaaaacctttagaatattttagttgtaaacgaagaaaactcgttggatcaatcgttgaaacaaaactataagaatgtgctttatattttttgttctgtttggcgatatagtcaatattttgttgtacatttttcttaacttcatcaggttttgaatttgaattttttggtaatggaataaataatcctttcacaatatcatcgggtaatttgggtgtgataccgtgtttatattttggttgataatggatattgtcataacgataacccaaatcaaaagataaataatcagttataacaaaattatcaaagagatagactgattttcctgttgttttaatgggtaataagtaagaaaattcaggatcaactcgagggcaaaggttagcattccagctataagccgttgcacaagtgtaaggttgatcataaaaattgtaaccaagcgtaggtgttgcccaccattgcacatcagaagcatcgttgccagcacgattaaccattcgcttcatcgcggtattatatgatccgccatattgtagattatgttcaatatgccaagttttgaagtctttggttaaatctaaatttaattgttgggtattggtgtctaaatctctctcttgccagaggcgttctaaataaccaggtgaagaaggaagaatagattttattttattagtcggatcctttattttagcgaattttttgccatttaatgtttttatttcaaggtcaacttctttccattttccatcatagccataagaatagttaccttcaaaaactttgatttttgcgttattttcacaattaaatattgaacaatcataccaagtgtcattggggttctttagggttagtttatcttctattactttcttatcagtatcaataaatttcttgaagtcataggtttcaccattactatgagctgtattgttttttttctcaaattgaagttctgatccatctcgacgtgttattttcccatctgttacttttagtcccgtaggattgtctgtgccttcacaatgtcttactccagcatcacaatactcatctgtgcgtgcacgagttttaatacgttgatcagaataagtgatttttaatgtatcccaaaatggagtttgggagaaattttcataactaaatgaaatattacgtctctttgttttatcattggtgtgtctagaatcaacttcggctaaattaggatctgttttttgatattttaatgtataggataaatcttgcccacgagaacgatgttcatataaatcagcggcaaaggtaaaacgatgattttctgtaggattgaaagataattttaataatgtactatcttgttcaattttatatggatctgctttttctctttttttaccttgaattttatcgttataatttttataaccatagttctcaagttcatgcccatttctgcttgttgtaaccactagcacatcgaactttttataacgtcctgcaagagtaagagtattgaatgattgattattttctgtagcgtatccctttttgtaacttacatagtaatccttgtttatgagataatccctcgcatcttttgttttataaattacagaaccacctaaggaaccactaccattcttaatagaatcagcaccttttgtgatatttacttcttttaaggtttcaatttctgcaccattacgcgtgttattgaagttaccataaccttcaaaaagctctttaaagccttgagaagataaggtttcagcttgacgtaatccatcaatattaatcgctactcgattttcatcaacccctctaatcgcaaaaccgctttgaccaaaacgcccagcttcaacaacagtaacgccagtctcgtatttaacgatgtctttaatgttgtttgcttgttctctttctagcgttttagccgtttttacagtttcggcaattttaggcggagctttcgtatcagtattttcggtagagccagaaacatttatttgttctagttgttcagaagcattactattttggttggttggttggttggttggttggttggttggttggttggttggttggttggttggttggttggttggttggttggttggttctgcataagcaacacttgccgttagcccaagcataacggaataggcaagcacgtttaatctaaaattggtcatatttagtcctataaaaaaataataataattctcaaatatattatacgaggaagtattttctcacaacaataaagattgatttttgataaaaatcaagaaataaaaactattcttattattttctgtatttaaacctgcttgtttcctataatgcgagccgttgattgttgatattagtagnnnnncattccattcattaattaattaatgaatgaatgnnnnnacaggcggcttattttcacgaattaagcctgttaagtgcggtcattttgggcatccttttgattgcagcattggcattacgtgcttttgcaggtaaaaaatcggtgcaggcgtcttattttgccagtaccaaagtgaagcatgaattgcgtagccttatttatcgtaaattggcttctatgccgcttaatcaagtgaatcagcaatccacttcaagcattatccaagtggcatcagaaggtgtagaacagcttgaaatctactttgggcgttatttgccgcagcttttttatagcttgcttgcaccgcttacactctttgctttcttgatttttttcagttttaaaactgccgtgattttgttgatttgtgtgccgcttatccctatgtcgattattgcggtgaataaaattgcgaaaaaacttttggcaaaatattggtccatttatgtgggattaggcagtagctttttagataacttacagggtttaattacgctaaaaatctatcaagatgatgcttataaagcgaaagagatggataaagaggctgagcatttccgcaaaatcaccatgaaagtgcttactatgcagcttaattcagtatcgctaatggatttactcgcttatggcggcgcagcaatcgggattttaaccgcactattgcaattccaagatgcacaactcagcgtgttaggcgtgattttatttattctactttcttctgagttctttattccacttcgtttgcttggttcattcttccatgtggcgatgaatggcaaagcggcttcagataagatcttcacattgcttgatacgccagtggaaacccaacaaagtgcggtaaattttgaagcaaaaaataaccttcaagtggaaattaaagatctgcatttttcttatagtgaagaaaaaccagcgattacaggtttagatttgagtatcttaccaaaccaactttctgtatttgtgggtaaaagtggttgcggtaaatcaaccttagtttcgttattgatgggctttaataaagcgcaacaaggtgagattttatttaatggacaaaacgccctcaatattgaccgcacttctttctatcaaaaagtatcattggtaagccatagcagttatgtgtttaaaggctcactgcgtgaaaatatgacgatggcgaaaattgatgctacagatgaacaaatttatgcgtgtttagaacaagtcaatcttgcccaattcgttcgtgataatggcggattagatatgcaattattaagccgtggcgcaaatttatcgggcggtcagattcaacgtttagccttagcacgtgctttattacacawtgccgagctttatatttttgatgaagcgaccagtaacattgatgtagaaagcgaagaaatwattttgcagtttattcaacaatttaaacaacaaaaaactattgtgatgatttctcaccgcttggcgaatgcggtaaatgcggactgtattaacgtacttgaccaaggcaaattgattgagcaaggcacacataaagagctaatggaaaaacaaggtgcgtatgctgaaatgttccaacaacaaaaagatttagaacaaattagagaggtggcaaatgcgtaaaaatggttttgttgtaatggggcatttgttgaaattagtgactccacttgcgcacattatggcgtttaccattactatgggtacgctcggtttccttgctgccatctttattatggtgctgggtgcgacggggttagtgaatcttcttaactttgacacccwtttaagtttctctggaattttgaccgcacttatcgtattggcggtggctcgtggtgcattgcgttatttagagcaaatgtcagggcattatatcgcctttaaattactggcattattgcgtgacaaagtgttttcttccttacgtcgtttggcttttgtgaagttgcaagataaacaagcagggcaattagtgtctttagtgactaatgatatcgaattactcgaagtgttctatgcgcataccatcgcaccaattatgatcgcattctttacctctgcgattttattgttggtctttgcccagctttcaagctggtttgtacttgtggcattggctgcttatttaacagttggcgtgattttaccgattatcaccaccaaattggcacgtgaagatggcagacgttatcgtgaattagtgggggaaatgaatgacttcttcctcgatagcgtgcgtggtatgaaagaaattcagcttttcggttatgcaaaacaacgtttagatgaaattcaacaacgcagccaaaaaatcgatacggcgtttgagcgtatcaaaaaccaagaagcgaaagttcgtgtttatactgaagtggcagtatctgttttcaacattattatgctgtttactggcttaattttatttagcttagataaaattgatttcgctgcctttttaatcggcgtgattttattgatgtcgagctacgggccagttatcgccttaagtaacctctcaagcaacttgttacaaaccttggcttcaggtgagcgagtattaagtttattagcggaagaaccagagttaaaagatgtagaaagtgcggtagatttaaaagatgtttctcgcattgatgtggagaatgtaaacttcgcttacggcgaagaacaaattttatcggatgtcagcttatctgtgaaaaaaggcgaaatcttaggtattcacggcagaagcggaagcggtaaaagtaccttgttaaaactgctgatgcgtttttatgatccaaaatcaggtagcattaaaattaacggcgaaaccttaccgaatatcaacacccgtagtttgcgtgacaatatggcgtacattactcagcaaacctatattttcaacgaaaccattgaagaaaatattcgcctcgcgcgccgtgatgcaaccttagaagaaattatggaagcggcgaagaaagcctcaattcacgattttattttaagtttgccacaaggctatcaaacaaaaatgacagaattgggcggcaatctttctgacggagaaaaacaacgtatcggtattgcccgagcattcttgcataatgcaccgattatcttgcttgatgagccaaccagtaatttggatagcttaaacgaagcaatgattttgaaatcattactcaatgtgaaagctgaaaaattgattattctcgtcagccaccgccaatctaccatggcaatttgcgatcaggtaattggcatagaaaacggcagaatgtcctaaattaatataagaaaaaatcgcactgttaaaggtgcgatttttttgttggagagaaaaagtgcggtgaaaattccctttggattttatagttcaggttcatttaataggttaagaaaagctaaacgcttgcgataagttttcagcacgcaatcaatatgtggctgcggcataaaggattgtgaataaatctgctctactttttccttttcttgtgtaatttcaggaattaatttttgaataatcacatttttatttaatccaatattttccccaaactcgacaaaatcatcgccgatatattcaccgtattgagtattaaatcctttggctagtgtggcattaccctcttctcgcactaacaatggcaaggcaagtagtgttgaattaaatatttcaggatagggcgacactgacacaaaatcataaattggagcaagttttggatgactgtttttgggataaataaatgaaaaattgcgtaagtgaagatcattatttcctaataaataagcgtaaataattcgacgaaaaatttctcgttgctgagctaaatgattttctgtgtgctgcaaaataaacttttagcaatttgttcataacttacatattgctcattatctgcacctatttttccatacttgtctcgaatattcattgcaccatcaagttgttcttggtgcattgttttttgctgtttatcacgatcaaaacgctttataacaaaagcaaattctttatgattttgttcgccagcaaaagaaactaaaccattttctggcacatcaaaccctaattctttcataatgcgcatggtggcgtgttcattttcagctaaaaaaggatactcttctggagagggctttaaaatatagtttccctgttgatttatgctgttaaagtgatcatcttcgataataagctgtaattttggttgaaaacctgaaatgctcattccttgctgtttttggggtttcactgtaataaattcttggcgagaaaaaggtaattcaggattaaaatgtttattgcctgtaaggtaatgcaaaccttcagcactgtaacctgaaagtgcttcatttttctttaatggctttaataaaatacgacaaaaattcattgtttttcctcctgaatttgcactgcacctaacatattttcaccattattaagtaaaaagcgaaacatatcaccttcatcaattcgttgatgaaatgcatatttgtgttttagccagccttctgggactagcgatgcaaaataagggaataaggtgtcagaatgaaaagggctttgctcaataggaaagctgagagagagcggtattccttgataatcgggattgtaagcaaaatgaaaaccacgatgatcttctctaagtaagccaataaattcaccgtagagaaatacttttcccgagcggactaaatcgcgcatagtgaaacccctaatgtttgagcaacaagaaacacggttgtaaatctcacttggcttggatcttgaaataatcggttcaaggtagaaatagacacgccagtttgcagttctagcatactaagctcaataccaagtgatttacgcttatcattgagcatttttccaaatgctttgagatcggtaattttccctgcgtaaagtagttgtctttgcgcttgttcataggtaatgactgatttctgaagcttttttaattcatcaatttgattttctaattgtgcactaaggttattcatatttgatactttttcttttaataaaatatttttatatcatatatggtttttcgcttttttgaatatcttttttgattttttttagggaaaaatttgaggaattattcaaaaatgatacttaaaatctgctctgtccatttgtaatttgtcccattttttggagagcagattaaattaattgaaatgttgtttgcttgagctaaatattcaaaattttataaaggtcatccaaataatgaatggattgaattttacgaattgtgcgggattttcctcgaattaaaatggtttcagtgctggctaaattgccttttcgggaaatgcctttaagcaaatcgccattggtaatgcctgttgcagtaaatacaagattgtcatcacgcacgagatcttcaagttttaacacttcattcacttttacgcccaatgctgcacagcgttgaatctcattagctgcaatttttttattttcttcggtgtcgctttttacttcattgcgtgggattaaacgagcttgcatatcgccacctaatgcgcgaatggctgcagcagctgccacgccttctggcgcaccaccaattccataaagaagatcgacttcagcatcaggtaagcagcaaagcacagaacctgccacatcgccatcaggaattgccaatactttcgcacccaagttatgtatttgtttaattacggcatcgtgacgtggttttgctaataccattacggtaaggtcagaaagggattttcctagcttagatgcgatgcggcgaagattttgttccagtggtaaattcaaatcaatgatgccttttacatttgaacccaccactaatttttccatatacatatcaggtgcttttaaaaaggtatttttgccacctgcagccaagacagaaatagcattagattgccccattgcggtcatacgtgtaccatcaataggatctactgcgatagaaactaattcccctaagccagaaccgactttttcgccaacataaagcattggggcttcatcaatttcgccctctcctataacgatttcagcgtccatatgaatcaaattcagcatataacgcatcgcttttaccgctgcatcgtctgccgcatttttatctcctcgaccaagccacgtgtaagctgctagagcggcggcttctgttactcgtgaaaattcgatggctaatgctcgattcattattattctccttctgcttatttttcaagattatggtaaaaatagcatcattctatcactgagtaatcgtttgcataataaatttttattcaatgctttaaaaaggtaaatttactgggtaaaatacccccaaacttacccatatttaaaaggaaatcattatgtctttagaaattttagaccagcttgaagaaaaaattaaacaagcggtagaaactatccaattacttcaattagaagttgaagaattaaaagagaaaaacgcagaatctcaaagaaatatcgaaaacttacaaactgaaaatgaacagctgaaaaacgaacatcgtaattggcaagagcatattcgttcattacttggtaagtttgataacgtttaattgtaataaaaggcttagattttctaagcctttttgttttaatcatttcaataattttcttttctctttgagaagaaaataaatataggataataaaatgcacatttgcattctttcaggcagcactttaggtggtgcggaatatgttgccgagcatttaaacgatgttttagaaactcaaggtttctccaccgcactttttcacggaccaaatttatctgacattgaaaacgagaaaatttggctgattgttacttcaacgcatggtgcaggcgaattgccagacaatttaaaacctctatttgatgaattagcgaatagccaaaaggatttttcagatgttcgctttgcggtcgttggattaggtagttctgattatgatactttttgctatgcagcggacaaagtggagcaaacacttcaagcaaaaagtgcggtaaaaatttgtgagactttaaaaattgacgtgttaaacgtggatgatcaagaaagttatgctgaagaatggttaccgagttttattgagggattgaaatgatcgccctaattcagcgtgtgtctcaagcaaaagtggatgtaaatggcgaaacaatagggaaaattggcaaaggtttgttagttttgcttggcgtagaaaaagaagataaccgagaaaaagcggataaactcgctgaaaaagtgcttaattatcgaattttcagtgatgaaaatgacaaaatgaatttaaatgttcaacaagcgcagggggaattacttatcgtttcgcaatttacattagcagcggatacgcaaaaaggtttacgcccgagtttttcaaaaggtgcgtccccagcattggctaatgaattatatgaatactttattcaaaagtgcgcagagaaattacctgtttcaacagggcaatttgcagcggatatgcaagtgaacttaacaaatgatgggcctgtgacgttttggttaaatgtataacaagaaaatctaagttggcaataagctcactgttttacatttgttttattaaatggtttagttaatggaatattctcgttaaagcgtataaattccatcaattaataatgaaccatatattccaaggttggtaagcaaaaaggcggactgaagccctctattgctccctcacccataaatgggcgtttcctttcaccaatggtgacttaataataacaagcaatcgcttattatttcactaataaaaatgcgatgaaattcttttcaaatttcaccgcacttttaagaatataagaatagtaaattattgtcggattaaaagagcaacggcttcacaagcaatcccctcttgtcttcctgtaaagcctaatttttcggtagtcgttgcttttacattaacttgctcaatatcgcattggatatcttcagctattttggcacgcattgcatcaatatgtgggcgcattttaggtgcttgagcgatgatggtaatatcaacattacctattttatatcccttttcttgtacttgacgaaacgcttcacgcagtaagcctcgactatccgcatttttatattgcatatcagtatcggggaaaagttttccaatatcgcctaaagccgcagcccctaagattgcatcagttaatgcgtgtaatgccacatcgccatctgagtgcgcaataaagcccgtatgataaggcacttctacaccaccaataattaatggacgatcttcgccaaaagcgtgaacatcaaagccgtgtccaattctgatcataatttattccttgttaaataaaattctgctaatgctaaatcttctggaagagttacttttaaattatcgctacgtccagccactaagtgcggtcgaaatccagcaagttctattgctgatgcttcatctgttatattcgcaccttgttgaattcctgtggaaagcgcatctcttaatatatctactgggaaaaactgcggtgtcattgcttgccaaagctggctacgatcttctgtttttacaatacattgctgattgtccgctcgtttaatcgtatctgttactgggattgccaaaatcgcaccttgtttatcttcaatagctaacaatttatcaatatcagcatgttgtaaacaagggcgggcagcatcatgaacaagcacccaggcatttttttccgcaattgcatttaaaccatttaagacagattcagctcgcgttgtgccaccttccactaactgaattttaggatcgagcgatagtgtagaaatataaggatcatctttgcttaccgccaagataattttagatacggcaggataagaaagcatcacatcgagtgtttgttcaagcagtgttttgccaagcagcgttaaatattgtttcggtttatccgcttgcatccgtgaacccacgccagcagctggcaagaccgcaataattgaacgagccattatttactctcttttacaatatgatagaacacttcattttctttcactaagccatgttgcattcgtgcgcgttcttcgatcgcttcaaaaccttttgttaatccttgaatttctgcattaatacgctgattacgttgagatagcttttcattttctgcttgattttccttaattttctcagcattttgacgataatctaaaaaaccgttactgccaaaccaaaaattatattgaaacaatactaatactgaaagaaggattaaaataagaagtcgcatacggatatttattgtgagtaaaattttaacctgtttaccgtgaaaaattaggaaaaacgataaaatgaaagaaagtgcggttaaaaattcttttattttaaccgcactttttgtataaaaattattttctagagagaggtggaacaaaggttaaacctaaatcccaaggttgctcaatccaagtattttgtggaatatcaattacgtaatcatccactaattccgcacctgcaggttttgcaaatacagtgacaaattttgcattagggtacatttgacgaatcgcacgcgccgtattacccgtatcaactaaatcatctaccacgataaatccttcgccgccatttggcacttgggctgcatgaagaacttgtaattcaccttgattgttatgatcgtgataacttgcgatacaaacggtttcaatatgacgaagacccaattctctagccaatacagccgctggaaacaaaccaccgcgactcaccgcaataatacctttccattgggaagctggaagtaaacgttctgataatctgcgggcatgcatttgaaacatatcccaagttaccacatatttttcgctcataattgcaccttagtttaaatttatcgagaaataaaaaattgcgtaaggataacccgaaatggcgttttatgctattatttcgtaaatattttcagtaaaaaggagcaattatgtctgaaattacaacacttcaaccttcactgttatggaaatggttcgatcaaatttgtgcaatccctcatccttctcattatgaagatacgttagctaactttattgtaaattgggcaaaagaaaagcatttttttgttgaacgcgatgaagtaggtaatgtcctcattcgtaaacctgcaacaaaaggaatggaaaatcacacacctgttgtgctacaagcccatctagatatggtgccacaggctaatgaaggcaacccacatgattttaccaaagatccaattcaaccttatatcgatggagaatgggtaaaagcacgaggtaccacattaggagctgacaatggtatcggtttagcctctactttagcggtgttagaaagcaatgatttagcccatccacctcttgaagtgcttttaacaatgacagaagaaacaggcatggatggtgcgaaaggcttacgtcataactggttacaatctgaaattttaatcaatacagataccgaagaaattggcgaaatttacattggttgtgcgggcgggattaacgcaaactttgaaattcccgttcaatatgaaaccaatacgtttgagcacagcgtacaaatcacccttaaaggtttacgtggcggtcactctggtggcgatatccatacagggcgcgcaaatgcaattaaagtgttagcgcgagtattagcaaaactctctcaaaatcaaccgcactttgctctctctgaaattcgtggtggctcaattcgtaatgcaattcctcgagaagcagcagctgtgttagcctttaatggcgatgtaaaaaccatagaaagtgcggtagaaaatctagcggttgtgcttaaagaagaattagcaattgcagaacctaatttcacactttttgtagaatccgcagaaaaagctcctaccgtattcaccgcacaaagcactcaaacggtaattaacgcactcaacgtattgccaaacggcgttatccgcaatagtgatgtagttaaaaatgtcgtagaaagctcattaagcgttggcgtattgaaaacagaaggtaatgttgtaaaaagcactattttagttcgttcattaattgaaagcggtaaatattacgtaactgaaatgcttagctcacttgcaatcttagcaaatgcaaaagtcgagttttctgcaccttatccgggctggcaacctgtaaatgactctactatcttagacgttactcgcaaacattatgctgaagtgctaggcgagcaacctgtagtgaaagtcattcacgcaggattagaatgtggtcttttaaaagaacattatccaaacattgaaatgatttctgttgggccaacaatacgaaatgctcactcaccagatgaaaaagtggaaatcgcaacagtacaaacctattgggatttattgacaagagtacttgccgatattcctgcgaagtaatctaatattaattaaaagtgcggttaaaatttcttttgttttaaccgctcttttatttttttcgtttcgctcttgggtgcgcctgatcgtacacttctgccagatgttggaaatttaagtgagtataaatttgtgtggtggaaaggttgctatgcccaagcaattcttgcacggcgcgtaaatcagaactggcttccaacatatgcgtcgcaaaagaatgacgtaatttgtgcggattaagatggctatttaagccttgacgaataccccaagtttctaaacgtttttgaatagctcgatgagaaatgcgatttccaagctggctaacaaataatgcctcatcttttgggttaaataatgcccgcacttttaaccattcttgaatggcatgcgaagcgtaacgcccaaacggcacaactcgttctttgttacctttcccgataacgcgtacttcccgcacacgggtattaatgctgtttaaatctaagccttgtaattcagataaacgcaaacctgaactatacattaattccaaaatagcacgatcacgaatatcaattggctctttgctatcgttggcaagcaattgttgaacttgctcgccatccatatttttcggtaaatgcctgccttgtttcggtgcagaaatgcctgtggcaggatttacttttaattcgccttgttgcactaaaaaactgagaaatcgacgcaatgcagataaacgcaaagccaagcttttttcttttaagccttgttttttgctttccgctaaaataaagcgcaccacgctaggcgtcacttgtgtccaagaatgaatatcttgttgcgctaagattttgatggtggcatcaagctgatgttgataattggtaagtgtgtgaggactcatttggcgttcaatccgcaaataatcccaataacgatttaacgctgttagcatgacaaactcaattcaaataaacgttctttcgggtttaatttaaacccttccgattccaacattgaatattgattttgcgctaattctgccactaaacgattggattgcgtgaaatgcacaaagtcttttgctttagaaatcaacgccgcataaatttctgtttgttgcgcatgttccaacacaaaaatatcggtgatttgccaatagcgttgtaattgtaaagaagaaagacgagggaaaagctgcacaaagccaatagccttttcattttcatccaccgcaataaaaaacaggctttcattaaaacgcatacgattagttaaaaaagccaaagtgcgttctggattctctgcttgcccataggcttggcgataggtttcaaaaagaggaagaagcacttcaatattccattgttcagctttgaaaagtttcataattggttattttttatcggttccatacaggtaattgtagctttttagctcaagataatcatctttctgtgagaatttttttaattttatgatcttctgcaaagaataggggcgaaattttggtatagtaagcaagttaattttatcaactatggagaaacaaaaatggcacgtcgtcctttagttatgggtaactggaaattaaacggtagcaaagcattcacgaaagaattaatcgagggattaaaagcggaattacatgatgtaacaggttgtgatgtagcaattgccccccccgttatgtatttaggtacggctgaagcagcactttctggttgtggttgcagctgtggcggtaaaagtgtgattcaattaggtgcacaaaacgtagatatcaatgtgaaaggtgcatttactggtgatatttctagcgaaatgttaaaagattttggtgcaaaatacatcattattggccactctgaacgccgcacttatcataaagaaagcgacgaatttgtggcgaaaaaatttggtgcattaaaagaagctggtttagtgccagtattatgtattggtgaatctgaagcagaaaacgaagcaggcaaaacagaagaagtatgtgcgcgtcaaattgatgcagtcatcaatgcattaggcgtagaagcattcaacggtgcagtgatcgcatacgaaccaatctgggcgattggcacgggtaaatctgcgactccagcacaagcgcaagcagttcacgcatttatccgtggtcacatcgcagcgaaatcacaagccgtggcagagcaagtaattattcaatacggcggttctgtaaatgatgcaaatgccgctgaattatttactcagccagacatcgatggtgcattagtgggtggcgcatcattaaaagcccctgcatttgcagtaattgttaaagcagcagctgcagcgaaaaactaattttcagttaattagaataacaacaaaagtgcggtaaatttttaccgcacttttttatatcttatatttttgatgaatgggttagtaagtggtatcaatcggtaattctgctctgcaccatccatcaaatccgccaatcatactaaatacatttttatagccttgttccacgagaaaagtcgctacatttcgactgctcacgccgtgataacaactcacaataataggcgaatcaaaatctgctagttcttcaaattgcaaaaaactttgatttgttaaatgaaaagcacctttaggatgtgaataagcaaagcgcatattatctcgaatatcgactaatattgcgccttgttgcatcatttcccaagcttgctgtggagttatttctttaaatgacatttataaacttccttttgcgtgttgtttgtaaacgccatcaaccataacaagaatcatcgcgatgactaaacaaataaaaagtgggtagctttcgctatcaatttgttctccgatcaaaaatgatacgcatagcatcataatagtttcaacataaccaagcagaccgagtaaattcataggaagcatattactggctattacataggcaattaacgcagtaccgctgattaatcctagtaatacaagcagcccccaaataaacggattggtttgctgtactgtcgcgaaatctgtttgtaaagcaaaataaatactgacaggcataaggcttaacatttctaaacaaaaggaggcaagatcggtattttttaatgcttttcggatagaaaaatatgcggtgtaacctaaacagataacaatggcttcccaagaaagaccaccttttagcacaatattagaaattacgcctaatgttgcaatgataactgcaataaatttgaatgttgaaatgcgttctttaaaaaacacgcgacctgccgccaccattacaattggtaaaagtagataaccaaaagatacgcttaatgaactgccattattcggtgcccaaagaaaaagccacatttgaaaacccattaataatccgcaaagtaaatatgacaatgctaagtgcggtcgtttttgaatgcgttttaaacgttcaattaaagctgctttttgtttaaataatgtgacggacaacaggacaaaaggaaaagtaaatatcatccgataaccgaaaatatccgtgccactcaaaggttttagtaacgtagaaaaataatacatatagccaaataaaaacgaggctaataatgaaacgagaatacctttaaacataagaaatccttattttaaaccattatttattctattctaacatcgcccaaaatgcacggactaggggctgttcgagatttcttttttgggtgcaaatacctaattcaaaaggctcaataggtttatcaagattaagtctggaaatttggttattcattgggctgctgtcaattactgcatcaggcaacattgctaatccaaatcctaatcccaccattggcacaattccttcgtgtcccgcaacagtagcataaattttcgggtgtttaatttgtttctctcttaaccattgttcaattcgctgccgagcgtgcccttcaacaggaaaaataaaaggcatttgctgccaatcaataggtttttcttgcaataattgtgtcgccaaacaagccactcgcggggcaattagggacaaactaatatcatctattttatgaaacactacactagagggcagattatttggtttccccgcaagcgcgagatcgacttgttgtgcttgaattaattctagtgctaacgctggatcacccgtagtcagttgaatttccactttaggataacgctggcgaaactgtttaagtacgtgaggaagatggctataagatgcggttacagaacaaaaaagtttaatttcaccgcaaagttcatcggattcatctttcagttgttgtttaaattgttgccagttttgccattctgttttagcaaattgcaaaaatttctcgccatattcagtaagtttgacttggcgattatcacgaataaaaagtgtctttcctaactcgtcttccaatcgttgaatttgacgggaaagggtagagggagacatgtggttttgggtggcggttttggtgaagttttttgtatcactgaggtggatgaatatttgtaggtcggtaaattccataatttcttcttttatttaatatcgggtttcgccgatggcgacctactttttctttgctcgtgcaaagcaaaagtaggcaaaaagaaaacacgccctactttgccttatttcctgaaaaattggaaatttgcttaacggaaattttctgaactcgctacgctcaaacagacgaaaatttcctacaaatttccaatttttcaggcggcaaagaagggaacccattttgttctttcttaaatttaaaaacgaatgcaaaactaaccgcactttttaaataacaccaaggtaaattatgccccatataaatcgcctttgcgactttcaattttcaggcaatttgcgtctgtttgagcgtagcgagttcagcaaattgccgttaagaaaattgaaacaaagcaaagaacagcgatttaactggggcgtgttttctttgcctactttcttttacacgagtaaaagaaagtaggtcgctcatcgagcgaaatacgatgccaattaacaaaaaacaaaataattgcacaaatcgcaacattacatttccataatatcactttacgcaacaacaaaaaatcctataatcaacccacaacaaaaaaatatgcaaacacaacatcatacaattatcaaccttacacaattaaggacaacaaaatggctaactatttcaacacattaaatttacgtcaaaaattagaccaattaggtcgttgtcgttttatggatcgcgaagaatttgcagatgaagcaaacttcttaaaaggcaaaaaaatcgttatcgtgggctgtggtgcgcaaggtttaaaccaaggtttgaatatgcgtgattctggcttagatattagctatgccttacgcccagaagcgattgcagaaaaacgtgcatcgttccaacgtgcaaccgaaaatggttttaaagtgggtacttatgaagaattaattccaactgcagatttagtcgtaaacttaacaccagacaaacaacactctaaagtagttgtcgatgtcatgcctttaatgaaaaaagactctgcatttggttattcacacggattcaatattgttgaagttggcgaagaaatccgtaaagatattacggttgtgatggttgcgccaaaatgtccaggtactgaagttcgtgaagaatacaaacgtggtttcggtgtgccaacattaatcgcggttcatcctgaaaatgacccgaaaggcgaaggcatggcgatcgcaaaagcatgggctgctgcaactggcggtcataaagcaggtgttttagaatcttcattcgtggcagaagtaaaatctgacttaatgggtgagcaaactatcctttgcggtatgttacaagcaggctctatcgtatgttatgacaaattagtggcagatggtaaagatcctgcatacgcaggtaaattaatccaatacggttgggaaaccattaccgaagcgttaaaacaaggcggtatcacattaatgatggatcgcttatcaaacagcgcaaaattacgtgcatttgaactagctgaacaaatcaaagaaagccttggtttcttatattacaaacacatggatgacatcattagcggtcacttctctgcaacaatgatggctgactgggcaaatggcgataaagatttattcgcatggcgtgaagcaacaggtaaaacagcctttgaaaatgcgccaaaatatgatggcaaaattagcgaacaagaatattttgataacggcgtattaatgatcgcaatggttaaagctggtgtagaattagcttttgaagcaatggttgcaagcggtatttatgaagaatcagcttactacgaatcacttcacgaattaccattaattgcgaacaccatcgcacgtaaacgcttatacgaaatgaacgtggtaatttctgataccgcagaatatggtaactacttattctctaacgtagcgaccccaattcttgcaaaagaaattatccctaaccttcaaaaaggcgatttgggcgagccaactccagcagtggaagtcgataacattaccttacgtgatgtaaacgatgcaattcgcaaccaccctgttgaattaatcggtcaagaattacgtggttatatgacagatatgaaacgtatcgcagttgcaggttaatgttaaattgaactgaattaaaaaccgactttgtcaatataaagtcggttttttcatagataaaattaatcataaaaatgcacgttaattacaacatgcatttttcttatttaagcatccatcgacatacaaagtaaagttaatggatgaatacaagtcacgttagatgacatatcaatttgccatttacaggtttgacattcagatataacgtaatcaaatccaccctcgttaatattatcgaatagatttttaccaatagattgtgaaatttcatagttttctgatttaaaaccgtaagtccctgcaataccacagcattggctaggtaacataatgatttctaaacccggaatttttttcaacacttccaaagtataaggtgcccaacctgctttatctacgtgacaggcagtgtgataagccactctaagtttaagtggtttcaacggtaatgttttaccctctttgaaaagctgatataaaaatggggttaccatatggatatgcggacggactttggcgttatcgatacctaaaatatgatggtattcgtcacgcagattaagtgaacaacttgatgcttcactaatcacatctattccattttcatctaccatttttccaatgtaatcggtattgaattgtgcaatattacgagcgcgattaggaaaaccgtttaccattaatggtaagccacagcatttttctttttctaataacattaccccaatgttcatcgcattgaacactttaaggaattctttgccaagctgtggattattataattaacataacaaccgtggaaatatgctacttttcgctcaaatttttgttggtcttgtagcgcatttttcatataccagctacggaacgtaccaaacgcatatttaggtaaagtacgtttcttactgatattaagggttttttccaacataaatttggtggctttcagacccgtaatggtgttcacaatgggggcaagtggagtattgattttccccattacatcggtgttacttaaaatcgcatcacgcaatttattcattaacggttttttagactgcgctaagtgattattacgcgcacgtacaattaaatcgccaattttcacatcagacggacaagccacttcacaacgtttacagttggtgcaatatttaagtgcttcatcataaagttcagcagattttaagcgtaaacgctcgccatcaggccctgattgttttggccctggataaagcggattattacgtgaaacaggacaaacagcagtacaagcagtacatttaatacagctttcaaaactttcatcaatatatttatggcttttaggcgaattaagggattgttttgcactatcaatgagtcgttgaatattattatccatattattcccccttatttcgctaagatttcatctgccactgccaaggcagttacaacagccacacccgaaccacaaccaagttcaagggcattaaaaccaccaatcacattaccgacggcatataaattcgttaaaaattgaccgcactttttcacttggcactgggcattaatcgctacgcctgctgattgataaggttgtggatgagcaaagcgatgagcagtccaagtgaaacgatctttatcgttaaacccttcaacaccgataatatcggattcaaaaactggttcataaattttatcaaattcggaaataagccctttgctgaagaaacttcctgacgccaatacaaaattatctgcagtgatttcttcattttctagtaaacgagtattgatacaacgtactttatttccttcaaatgttgcattcaatgcactgtcgccattaatcattaaaccacccaaggattcaaatttatggcgtaattggattcgttggcgcataccaagtaatgatggtggcagtgttggtaattcaaataatgcaagtttagttgcatcacgaagtgcggtcataaattcttggttttctaaaccaaagcaagcaggtaaaaagaccgcttctgcaccttgcgctgattcaatgatttctttaacaagatcattgaacgcaagtttgtgctctagaagttgagagatatttacactacggaactcacgagcatttttgcgaagttcatctaattgtggaatatttaagaaaccactcgttacttcacaatgttcaaattgtgggtttaacactaaatttgccgctaaaagttgaggttgaaaatcgtgataaccttcaataccaagcactgcaatacgtttatgcggaaagggttcattaccttgcacagttggcacgctatttggcgaaagccacgcaccacgtaaactgcctaagcctgttacacgccagtgatttttttccgtagaaccaattaaatcaagatttaattcattggctaaacgttcaaaatcttgtgctttagcaagcactttctctgcacccaataaactataaggatgagcaggtaattcattgcgaagtgcggtaatattttcttttaaattttctactgcgcggttttccccatatgtcgttgatggcatacggcttaataaatctaaagagccagatgcaaaatcaatggccgcttgaccgttgttgataatcacgcaacgtttgccgcgttgttgaagggcgatgccacaggttaaacccgccaaaccaccgccaataatggctacatcaaaattcattgctatccgtcccttgttgtgcttgttcatcaagcggtttcacatcatttaaacctaatacactagcatacatccaagaggtaaattcggcttcgcggatagcttccccccaagcaatcggttcaataccacgccagcgttcttccataaaggcggaaagttgagtagttgattgacgtggtgttgccacttcaaaacgattcattaatcctgctgcacgacaagcacagagttcagcttgacaagttcccattccaactcgggagcgacgacgtaaatcgacgagattatttacatccagttcatcaatagcgtaacgaacttcccccgctgttaccgcttcacattcgcaaaccattgaacgatctaaacgttctttttcaagcaaacgagtagcccgtgaaccgtgacgatatacggcagaataacgaatagtacttggtaatgaaataactttttgattggtctcctgacgactttcagtcgaacctggtagagcctgttcagcagtaacacaacgagccgttttattgagttttttacaaacaaggtcggtcgcccattcagccattaaacgataagtcattaacttaccgccagtgatagtaataaagccatctaagccatcacgttctgcgtggtcaagtagcacaataccacggctcacattacgacctgatggatcatcatcgcttgcaactaatggtcgcaccccagcataagcacgtaatacgcgagtatgacgcaagctaggtgcgagtttttcaccttcacggaaaagaatatccacttcttctggcgtaacttgcatgttatcgatttgatcataaggaacacgacttgacgttgtaccaatcacacaaattgtatcgccagggacgagaatatccgcatcagcaggtttacggcagcggttaattacaagtttattaatgcgatgacccattacgagtaatgcgccttttgcagggaacattttaattttgagatcggcatattccgcaatcccttgtccccaaataccaccagcatttacaacaagcggtgcaaaaaattggcgttctctgcgatttttgtgatcgtacacattcacgccaatcacttttccaccttcacgaatcaaattttttacttcgcaataagtgaacatttttgcgccgttttctgtggcgtccatcatattagaggcggttaaacggaatgggtcaatagaaccatctggcacaacaacagcgcccactaaatcaggatttacagaaggctccataattttagctagttcaggatcaatggcttgtgcatcaattccagattttgcacagctctcaaggaaggttttttgatagtcgagcgaatcttcaggcaaagtgataaataagccttccgtttcatctacgcaatgacgcgcaattttgcgcaaaatgcggttttctttaatacattcttcagcagattcttggtcgttcacggcgtaacgcgcaccactgtgtaataatccgtggttacgtcctgtggctcctgtcgcaatatctcgacgttccaataaaatacaatcaatgccacgaagtgcacaatcgcgcgcaatacctgctcctgttgcgccaccaccgataatgatcacatcagtgctaagtgacgaaagatctccaacatcttttatagatactaggcgataatcccattgtttacccccgatcccaaaattaagaaaaaatnnnnncattccattcattaattaattaatgaatgaatgnnnnnagatgacacataattaaaaagttggagaaaaaattatgtttggaccattcaaacccgctccgcatattgcggaacttccagcggaaaaaattgattccacgtataaacgcttacgttggcaagtgtttgctgggatcttcttcggttatgctgcatattattttgtgcgtgcaaactttgacttagcacaaccaggtttaattcaagctggcttgtactcaaaagcggaactaggtgttatcggctcagcggctggtcttgcttacggtttatcaaaattcgttatggcaggtatgtctgaccgttctaaccctcgtgtattcttaccatttggtttattgctctctggtttatgtatgaccttaatgggtttattcccatgggcaacttcaggcattgccattatgtgggtaatgatcttcttaaatggttggttccaaggtatgggttggcctccatgtggtcgtactakggtgcattggtggtctaaatctgaacgcggtaccatcgtgtcaatttggaatacggcgcataatatcggtggtatggtgcctggtgcaatggtgttattagctagtgcaattttcttcagtactcacggtattgaagcgcaggcgaaagatgtttggcaacaatcattatacttccctggtattgctgcgatgatctttgcaattcctgtgtacttcgtgatgcgtgatactccacaatcttgtggtttaccatcaatcgaaaaatggcgtaatgactacccagatgactataacgaaaaaacttacgaaaatgatttaactgcaaaagaaatcttcgtaacttatgtattaaaaaacaaattgttatggtatatcgcgattgctaacgtgttcgtctatttaatccgctacggtgtattaaaatggtctccagtttacttgagtgaagtgaaacacttcaatatcaaaggtactgcatgggcatacacaatctatgaattagcagcggttccaggtacattattatgtggttgggtatcagataaagtgtttaaaggtaaacgtggtttaactggtttcatctttatgatcttaaccactgcagcggttgttgcgtactggatgaacccagctacaccagaagcagagcttgcaaactactcagcttggtatgaaaacccatatcaattaactgatttcgtattaatgaccttaatcggtttcttaatctacggtcctgtaatgttaattggtttacatgctcttgagttagcaccgaaaaaagcagcaggtacggcagcaggtttcactggtttattcggttacttaggtggtactgtatcagcttcagcagttatcggttgggcagctcaacattacggatgggatggtggtttctacgtaatgatcggcggtggcgtattagcggtgttattactcttaatcgtaatggttgaagaaggaaaacacaaagcgaaattaggcgatacctacggtactaaataattagcttaaaaaaggcggcgggcaaattgcttagtcgccttttttgtaactatcataagaataataaaaagataagtatcatttttgggaaaagtaaaaatgaataatgaaaatatggtaagagttttctatgtcttattaatggggttaggatttcctattatgagatttatgagtattcattttgaaactttaaataataattctgttagatttttatctggaggattattatttgttattatttgcttaattaaatttagaagtgagttaaagaaaataattggtgaacctaaaattattctttatttatttatttatttattttaggtatttttatgactggaaatatgtttttctttattaatggtttgaaatatacctcagcattggcaggaagtatctttggaatacttgctatgcctttagcaataattatagctggaatattctttaaagatgaaagagatcgtataagacaaaaagattttatattggaggattattagcaattattggttcgctaatattcgtaataaatagttcaaataatgatggaaatacagacttttttcttggtgcaatatttctttttacagctatttttattcaatctatacagaatttaattgtaaaaaaagtagccaaaaagataaatgctgttgtaataagtgcatcgacagcaacaatttcaggagtattatttttatgtttagcttttaatactaaacaaatatatttattacaagatgttggcattggaatgttgataggtttagtttgcgctggcttttatgggatgctaacaggaatgttgatggcttttatattgttcaaaaacagggaatcactgtttttaacattttgcaattattaattcctctttcaactgcgataataggttacttaacattagatgaaagaataaatatctatcagggaattagcggtattattgtaattattggttgtgtattggcattaaaaagaaaaaacaaggagtgttgatatataaagtagatgatgttggtggaataggtatagttaaatatctggttcaattggttttattaagggcgttagcaattctccatttaagtttatgtttgaattagatattttgggaaaagatggaagaataaagctgttaaataatgctgaaacatatgaactataccaatactcaaataaaaataattctgctggaaatgattataaatctctaattctaacttgtagagaggataatgactatcaatcagaaagaatgattaaagccattaaaaatattattcattgtatgactaataatcatcaacctatttcaagtgctgaaacatctttggaaactattaaaattattcacggaataattaattctgttaaaataggtaatgatcctaacaatatataaggagaataagtatgaaacttaaaactttagccctttctttattagcagctggcgtactagcaggttgtagcagccattcatcaaatatggcgaatacccaaatgaaatcagacaaaatcattattgctcaccgtggtgctagcggttatttaccagagcatacgttagaatctaaagcgcttgcgtttgcacaacaggctgattatttagagcaagatttagcaatgactaaggatggtcgtttagtggttattcacgatcactttttagatggcttgactgatgttgcgaaaaaattcccacatcgtcaccgtaaagatggtcgttactatgtcatcgactttaccttaaaagaaattcaaagtttagaaatgacagaaaactttgaaaccaaagatggcaaacaagcgcaagtttatcctaatcgtttcccactttggaaatcacattttagaattcatacctttgaagatgaaattgaatttatccaaggcttagaaaaatccactggcaaaaaagtagggatttatccagaaatcaaagcaccttggttccaccatcaaaatggtaaagatattgctgctgaaacgctcaaagtgttaaaaaaatatggctatgataagaaaaccgatatggtttacttacaaactttcgattttaatgaattaaaacgtatcaaaacggaattacttccacaaatgggaatggatttgaaattagttcaattaattgcttatacagattggaaagaaacacaagaaaaagacccaaagggttattgggtaaactataattacgattggatgtttaaacctggtgcaatggcagaagtggttaaatatgccgatggtgttggcccaggttggtatatgttagttaataaagaagaatccaaacctgataatattgtgtacactccgttggtaaaagaacttgcacaatataatgtggaagtgcatccttacaccgtgcgtaaagatgcactacccgcgtttttcacagacgtaaatcaaatgtatgatgtcttattgaataaatcaggggcaacaggtgtatttactgatttcccagatactggcgtggaattcttaaaaggaataaaataatatccctcacaaccgtgggtaaacatacccacggttaactaggtttctatatcgtagaaactaaaaatctactctaacagagtaacatcataatcaatctaggtgttctaacctagaattcaaataaggaggctatttcaaaacactccgtattcttttttaataaattctcttccctttacttagggaaaacactcttcatttcaaccgcacttctaaggagtgatctatggataaatcattaaaagcgaactgtattggcgagtttttaggtacagccttattgattttctttggtgtgggctgcgttgcagcactaaaagtagcaggcgctagttttggcttgtgggaaatcagcattatgtgggggatgggcgttgcacttgcagtatatgcaacagctggtttatctggtgcacatctaaaccctgcagtaaccattgccctttggaaatttgcttgctttgatggcaaaaaagtaattccttacatcatttcacaaatgctcggcgcattctttgctgccgcattagtttatgccttataccgcaatgtttttatcgattatgaaacagtccacaatattgttcgtggtacacaagaaagtttaagccttgcgggtacattctccacttatcctcatccaagtttaagcattggtggcgcctttgctgtggaattcgtgattactgcaattcttatggcattaattatggcattaactgacgatggaaacggagtacctcgtggtccacttgccccattattaatcggtatcttgatagccgttattggtggtgctatgggaccattaactggttttgccatgaatccagcacgtgacttcggaccaaaattctttgcttatctcgctggctggggcgaactcgctttaactggcggacgcgaaatcccttattttatcgttccaatggttgcacctgttttaggcgcattagctggtgcatggttatacaaaaaagcaattggcggcaatttaccttgtaattgcggctgcgaataattatttgaaggagtaatactatgacagacaaaaaatacatcattgcattagaccaaggcacaacaagctctcgcgcagtattattagatcataatgcgaatgtggttgaaattgcacaacgtgaatttacccaaatctaccctcgagctggttgggtagaacataacccaatggaaatttgggcaactcaaagctcaaccttaaacgaagtcgttgcaaaagcgggcattacatctgatgaaatcgctgctatcggtatcaccaaccaacgtgaaaccaccattgtatgggaaaaatcaaccggtacacctgtttacaacgcgatcgtttggcaatgccgccgtactgcagacattaccgataaattaaaagccgatggccatgaagaatatattcgtaataccacaggcttagtggttgacccttacttctctggtacaaaagtaaaatggattttggataacgttgaaggcgcacgagaaaaagctgaacgaggcgaattattatttggtaccgttgatacttggcttgtatggaaattgactcaaggccgagtgcacgtaaccgattataccaacgcatctcgtaccatgttatttaacatccatactaaacaatgggatgacaagatgcttgaaatcttgaatattcctcgttcaatgttacctgaagtacgtaattcttctgaaatttacggccaaaccaatatcggtggtaaaggtggtgtgcgtattcctgttgcagggattgctggtgaccaacaagctgctctttacggacatctttgcgtacatgcaggccaagccaaaaacacttacggcacaggttgctttatgttactccacacgggtaacaaagctattacatccaaaaatggactactcacaaccattgcttgtaatgcaaaaggcgaaccagaatatgccttagaaggttctgtatttatcgcgggtgcatcaatccaatggctccgtgatgaactcaaaattgttcacgatagttttgactctgaatactttgcacaaaaagtgactgatagtaatggcgtatatgttgttccagctttcacaggcttaggtgcaccatattgggatccatatgcgcgcggtgcgatttttggtctttctcgcggcgcaaaccgtaatcatattgttcgagcaaccttagaatctattgcttaccaaacccgtgatgtcttagaggctatgcaatcagattcgggtgaacgattacaatatctccgtgtagatggtggtgcgacaaacaataacttcttaatgcaattccaagctgacattttagatgtaaatgtagagcgtccagttgtgaaagaagtaacagcgctaggcgcagcttatcttgctggtttagcaacgggcttctggaaagatttagacgagcttcgcgataaagcccgtgtagaacgcacctttagcccagacagcgacaatgaaaaacgtgaacgtcgctacaaaggctggaaaaaagcagttaaacgctcattagaatgggcaaaagaagatgaagaataatttataaattaattctcatacaaaaagtgcggttaaaaattcttttattttaaccgcacttttttgtataaaaattattttctagagagaggtggaacaaaggttaaacctaaatcccaaggttgctcaatccaagtattttgtggaatatcaattacgtaatcatccactaattccgcacctgcaggttttgcaaatacagtgacaaattttgcatttgggtacatttgacgaatcgcacgcgcagtattacccgtatcaactaaatcatctaccacgataaatccttcaccgccatttggcacttgggctgcatgaagaacttgtaattcaccttgattgttatgatcgtgataacttgcgatacaaacggtttcaatatgacgaagacccaattctctagccaatacagccgctggaaacaaaccaccgcgactcaccgcaataatacctttccattgggaagctggaagtaaacgttctgataatctacgggcatgcatttgaaacatatcccaagttaccacatatttttcgctcataattgcaccttagtttaaattttgcgtaaagatgcacttcccgcgtttttcacagacgtaaatcaaatgtatgatacattattgaataaatcaggggtaacaggtgtatttactgatttcccagatacttgcgtggaattcttaaaaggaataaaataatttctattataaccgtaggtaagtttatttacggttattaatgccatctatgatgaaaaacacttttcaattgaaaagtgtttttcagaaagacttactataccctgaatgaataggaacataatatgaaaacaacgttaaaaatgaccgcacttgcggctctttctgcttttgttttagctggctgtggttcacaccaaatgaaatcagaagaacatgcaaatatgcaattacaacaacaagcggtgcttggattaaactggatgcaagattctggcgaatataaagcattagcttatcaagcgtacaatgcggcaaaagttgcatttgatcacgcaaaagtggcaaaaggtaagaaaaaagcggttgtggctgatttagatgaaactatgttagacaacagcccttatgctggctggcaagttcaaaataacaaaccattcgatggtaaagattggactcgttgggtagacgcacgtcaatctcgtgccgttccgggtgcggtagaatttaataattatgtaaacagccacaaaggtaaagtgttctacgtaacaaaccgcaaagacagcactgaaaaagcaggcactatcgatgatatgaaacgcttaggtttcaatggcgtggaagaatctgcattttatttgaaaaaagacaaatcagctaaagcggctcgttttgcagaaattgaaaaacaaggctatgaaatcgtactttatgtaggtgataacttagatgacttcggtaataccgtatatggcaaattaaacgctgaccgccgtgcattcgttgatcaaaaccaaggcaaatttggtaaaactttcatcatgttacctaacgcaaactacggtggctgggaaggcggtttagctgaagggtatttcaaaaaagatacacaaggccaaatcaaagctcgtttagatgcagtacaagcttgggatggtaaataattttccattaaaaagatcgatttaaatatcgattttgaaaatttaattgagaggctaagctcagtttttactggcttagcctttttagttttttagattaactcaagtaatctccattactacagcctgaagttttgctatgatgttgcaagcctttcaaaatagaaatcataagttaatgaagaaaaatttttcgacaggaaaattgccgtctaaaggaaaaagtgcggttaattttcaccgcacttttaagccaaaattaaaacccaaaacgttgtcgttggatgaaaccaaagttgtgttattcaataaaccttttgatgtgctcacgcaatttaccgacgaacaaggacgcgctaccttaaaagattttatttcaattccaaatgtttatgcggcaggtcgattagatagagacagtgaaggattactgattttaaccaatcatggcgaattacaacatcgtttggcagatcccaaatttaaaacagaaaaaacctattgggtgcaagtggaaggtatccctgaagaaaccgatttagcacaactcagaaaaggtgtagaacttaaagatggcgtgactaaacccgctaaagtgcggttaatttcagagccaaatttatgggaacgcaatccacctatccgagaacggaaaaatattcccacaagctggttagaaattaagattagtgaagggcgcaaccgccaagtgcggagaatgactgcgcatattggtttccccactttacgattagtgagagtgagtatgggcttattatctattaatggattagaaaatggctcatttagattattatcattggatgaaataaaagcgttatttcagaccgtcaaattataaaaatagggcaagtatttagcttgccctaaatttttctcccataaatattgcgcactgagtaaattagcactatccgcaatgcgatgagcttggtcaatattgaattgctcacttaaccttcaagcggtgctcgctcgaatatctgcaacttggaagttttttctaggctataaatgacgccttcgcgcaatgcaccgtcagaatagcgcatttgttgaatatgaaaaacgtcaaacactgcacttaaaatcgctaaaccgggtacaaaaacatccacgcggtcttggtttaaaccgttaatatttagctcggtaaaatgcttggcttgtagtgtttgttcaattagagcatttaatcgctcggcagtaatggttccatttggatcgagattagtcgcaatgacttgcgcaacagttttaatcgtccccgatgagccgagcacagattgccaacctaatttgcgatattcaaagcctaaatcttcgattttattgaccgcactttggcgcgcgcgttgaaagttttctggggaaataataccatcggtaaaaaattgagtcgcaaaactcacgcatcccatatgtcggctttcagctataagcggcgtgaaatcatcgccgataatcatttctgtcgaaccaccaccaatatctataacaagctttctgcctttttctggctgagtatggcatacgccagcgtagatggttttcgcttcagtttgcccactaataatattaatgggataggggaaaactttggctgcttgacgtaaaaattcgtcattattcaccgctcttcgtaacgtataagtgccaactacattgacgttttccataggaaaaccttgtaaacgttcggcaaataaggctaagcaattcacgccacgtgtgatggcctcttgattaagcaccgcattttcatctaagccttctgcgagttttactttttgttttaagcgagaaagcacttggattgagccgtttacaatacgcgcaacaatcatatgaaagctgtttgagccaagatcaattgcagcaatttcacgtacattgccacgatgtttgggttctaaaatagagtcgttcataacattcctaaaattcaaatttataaagcaaatcaaacacttggtttgtgctagaaacggattgaaaataaagctgtggcattaggcgataacgtaatgtaacttctgctaagccatcaaataaacctacgccatattttatttgtaagcgattggtaatattgccacttaccgtcactttggatttatcgcccacgccagatgtaccaaggtttaagtcttgaataccaaaaacttcgccaatactgcccactaatttaccgctctttgaaatgcctacaccaatcaatgctgcgccaactgatcccgttgaacccacttctccgctgctttctaacgaacgacctgttaataaataagaaagtgcttgatcttgtgatttgcttggttcactgaaaatagtgacttctgggctatcagctatgccaatcactctcacgccagcagtaattttgctgtcttccattgtttcaggattacgaatagcctcaatattcaatgtaggttgtgttgcttgcccagaaaagctaataagccctttacgaatgagtaaatcttgcccgaaagaagcatagcgacctttggttaaattgatttgaccgaataaacctaaattgcctttatcttgtttcacagaaagtaaaccatcaagattggttttcaagccataggcatcaaggctaacgtctttaccaatattgatgcgtaaatcagagcgaatttccattcctgattttgtttttgcggcaaattcacgtttaatcagttcttctttgctcttgtgcgggccatttaaaataacttcatcttcgctcactggctcagcagtatctggcagactgtcaattttaatacgcgcccaaggaatatccactgttccgcttaaattcaattccttcggattggcttttatcgtgatatttggactgaaacgtagcttcgccatagaaggaatatccacgttgaaattatttgcttgcgcatttaattctgttgtccaatgttcaatattagcccagtttgcacgtccagttaagtttaagtggctatctactgttttgattttcccttgcaatgttgaacggttaccattaaagcgcagggcaatatcgccatcagtaatattcactggcatagattttaatttggtacgaatattacgaatattgaagtcaccatttaataatggtttctctaaattcccaccgaaacgcaattttgataccacttctccattcacggattcgccttgagtgagtagttgattcgcaatacccaaacttaatcgttctatcgcaaggctaccgccaagttggcgatttttcgcaagatcgtttaaatgaatatcgcctacaattctgccttggttatgcacattgatgtctgtttttaaaaccaaattattattttgaatgtcggcgttaagtgttaattttggaatatccaatttaaatgtacggtaatccaatttttgagagaaggctaaatgattgccatctacgttggcggtaaattggaatggtttatccgtaaaccaagccacatttccttgcacttgtaaattgcctttgaggctgttttgttcgataagtttattcactaaatccaaattaacacgtttaaattggaaaggaatattgccttgcttgcctgcattgaatgcttgtgggaaacataattctacatcggtgttttgccagcaatgtgaggcaatattggcttgtgtttgtttgttatcgtaggacacagcaatcgcttggttggattttacatcgccaatcggagtttcaaattttacctgtgaaattgtgcctttccactgttccaaagtgcggtcaaaatgtccgttaatttgtaaatttgcagcaacaggctcgccttgagattttaggattagtttgtgattttgttcatcgcctgataaatcaagatcaagtaaatggagtttaatattttcgccataatgaagttgttctgctttaatattcaattttccacttgagagtgaggtattgtttatatgaccttttatacttgctttagctaactgaaaaccctgtaaatgtaaattagatgaagttaaatcaagatcaagattaggtgtcgtaatttgaccagaaatcgctactcgaccttttactcgcccttttaaatctgaccataatccacgtaaatttggcgcatttatatctagcgtaaaatcagaatgatcatctaatacgccactggctttaagataattttcgccatatctaacctgcaaatcaggtactgttagaagtaccttttgattgagcgttgcagaaccttttaaactgataggttttgcagaaagcattccgtttaaatcggctactggcacttccacttgccatccttgagagcctgcaaaaccacgtgaatgcaatttaccagatagtgttgcaggcattacaggaacaaaaaaaccaatattcattttttctaaatcggcttgaatatcccagtttgcaccctctttccagtttgcagtccccacaaattcacttttaccgtctaatgaatctatccccaatttattgacggtgacttcataaagtttgccgtcggcattaagttccacttgagatgcgggaatataattcattcctactacatcgcccttaaattcggcgtgataattcagtaaatcccctgtgagtttaagtgtcacatcattaattttgagtggtgccattgtgtttacaaaagtgtattgtccttttgccacgtttaatgtgaggtttaagggcattttgtcttgtgctaattgcacgtcgccattcagttcagcatctaatacgccttttgtttttaaagaaagtgcggtggattttttcaatgatcccgaaagtgcaagatccacatcactcgcaggtagaatttcttttccagcggatttcaacggttccaaatgggattttaaagttaaatctagtggcatatcgccatcaagttgtaatttaccttgtgaagaaagattacccaacgagctttctaccgctaatttttgtaattgcagttggttatcgacggtatccgcctgtgcaattaaactagacatttcaacagattgaagcgtttcgcctttttcattcactgcttgatactgccagtttttgcctgaaatttcaggaatatgtaaatcaaaaggaagaattatgtctgatacattgcctaaaaaagcaggtgttaaagattgctcaatcgcagcccaatctacaggcttattcggctgttcggctttcggctctgatttaacttcagacaatttttttgcaatcactgaaatatcgttaatttcagtcggcgcaagagttaagcctttttcattatttaaacttaccgcacttttaaaatttccaagcgtaatattagtctgatcaatgtttacagataaatcttgcaccaccaaattttctgcattgatactaattggcaaggaaatacgcttcattgagccagactttgaattatcaggtgccgatggaggcaataatgcagtattaatcgcaatcgtcggtttatttaaagtgaagtctcgtaaacaaacttcacgtgaaagcaaacaactgaaatcaagctgtaaacgtgcttgtgcaatatgtgtctcaatccctgcggtttggtatcgaatattatttagcaccaagccattttgtaatccgccttcaatttgctcaacggaaaaactatcaagcattttatcggcaagttgaattaaacttttttgccccgcatcgaaagaaagcactccagcaacacctaaaacaggtataaaaatgaccgcacttccgatacaaacagccttgcgtacccaatgtattttacttggttgctctggtgcttttggcgaagtttctgatggttgtatttgttctgtcataaattcaccttaaatttctgtaccaagtccaatgtaaaattgaatatttttgctgttatctttatcacgaatgggtgtggcaatatcaaatttaatcgcaccaactggcgatgcccaacgcacaccaacgcctgcgccataacgcaattcttttgctgtgtaattatcggcagctaatccactatctgcaaaagttgccgcccaccaattcggatagacttgatattgatattctaaagaagcggtaagcaatcgcgaaccgccaactaattttccgtttttatttttaggcgcaatttttttatagccgtaaccgcgcacactacgatcgccaccagcaaagaaacgcagtgtaggcggaattttttcaatatcttttgtatgtaaatacccgatttcagcacgagcaacgatacgatgattttctgcataagtacgaacccacgcgctagatgcttgcacttttataaaagaagattctgatagccaaattcgtttgcttaaatcaaaagtaattttttgcacatcgccccaagtggcaaaggaaccaccacgtaatcgagtacgagtaaatccaacagttggataaagaagtaaggttttatcagtgatatccgcttgtgtaaaactgtcgtatcgcgtacgaagtccgccaaaatattgccaaccacgcgcattattccaataacgtaacgctgacaacgtaagcactctcgtattggtatcattctctttttcaccttcccaaccgacggcaaaatcatagtaataatttaatggatttttaagcagtggcattcgataagttgcctctagagtttgttttggtgcagagagataaagatttgaacgcaaactatgtccacggctattaatccaaggttttgtccagcctatttgtccgtgtacaccgccatcagtagcaaagcccacacccagttccatcgcattttttttacgtggataaagaatgatttctatatctaccgttttacttttatgattgatattaggttgaactaatactgaactaaaccaatttgaagatgaaaaatggctggttaaatccgataaattattcattaaatatggatcaccagatttgatgttaagaatattatttaagtaatcatcccgaatttgtgaatggctaaaagtaatattgccataatgataacgaacgccactatcaaataacattcgccaccatgcttgatgggtttcagggctgatttctaaacgtgaaattttaaagttcccatcaaaatacccacgatttaatgccaagcgtgaaatcgctgttttgtaatcatcgtaagtttggtgctcaaccaaaacgccatctttcggtaagtttttacgcaatgcattaaaattttcatcttgtgcggcttccccctcaatttgcacatcagtccccgcaatttttgttggctcgcctggtgtaacatgagcaatcaataaatcgcgtttgccttgacgctgttttcgttcaaaacgcacggaagattcataataaccaaacacacgcaaaccacgatccacggctttggttaccaaatgttgatagcgttcggagccatccatttcttctttattaatcaaattaacattgagatctgtattacgcacagcacggaaaccacgaatgccttgaacttcaatatcaacggtttgttcagcaaatgcgggaaagcaacttaatgctaaaaaaagtgcggtgagttttagcgattttttcttcattttaaggggctaaaattttttaagtaaattgcactatagtctaacgagaagttcgttaggatccaatattttcagcgcattttgtcggttttttcataaaaaataccgcacttcattgccaaagtgcggtaaatttttgagctgttttaattagtgaccgccgcaaccacagctgccgtgattatgttcgtgattatgttcgtgatgatgaccaccacagccacaaccgtgaccttcttcgtcatcatcgtggctgtgcgcaccgtgaacgtggccgtgagcaatttcttctaacgttgcttcacgcgctgcaacaacctcaacggtgaaatgtaattcttgacccgctaacatatggtttccatcaactacaacttcatcgccatcgatttcagtaatcaccactggaactgggccaatgtcagtatccgctaagaaacgcataccgacttcaagttcatcaacaccttggaatacatcttttggtacacgttgaaccatattttcgctgtacgcaccataaccttcttcaggttgtacacgtacttcaaatttgtcgccaacttctttaccttcaagtgctttttcaagaccgactactaaattattgtgaccttgtaaatattctagtggttgatttgctggagcttcatctaccaatacgccatcttgtgtgcgaacttggtaagaaatgctcaccactacatttttttctactttcattatgttttccttataaaaaatccgttaaaaaagccgtatcattgtaacgaaaattattccgcacgcaagactttacggattaatggacacgaggctcttcttcatcttcatcatcaaaaaattccccatcatcgccgtattcatcttcatcggcatttgggtcttcaaaataggtgccccaaccatcataaatgcctttatgtttttctaacaatggaaggatttctttttgttgtgcatcgataatttcagcttttaattctacttcactgatgatgtcaaaacagaaaattggtttaccgtcatcatctttaaattcttccgcttcggaaacttcatagcccgctttaaacgcatcaaccgcgattttttctaacaaatcaaaatcgtggtgtgcgatgtgatgctcaataatgtaaagcgcatttggatcactgccatcattaagtaaatcttcgataatttcacgggtttctgcttgtaattcagccaattttgacataataaaatccttcaacaagaacaaaagtgcggttattttagtggataaatcacgaaaagtcgcatagaatttcgcacaattattttcgataaaaaagaacccttaactatgctcgaacaactcccttatttggcattaaaaactccgccaaaaaccaccgcacttttaaaggctgaatgcgcggattttattgtaaaagagcatttaggctatgaaatgtcgggcgatggagagtttgttgcattgtatgtacgcaaaacagattgcaacaccttatttgttggcgaaaaattagctaaatttgctggtgtttctgaacgcaatatgggatatgcagggttgaaagatcgtcgagcggtgacagaacaatggttttgcttgcaaatgccaggaatggaaacgcccgatttcagtcaatttgaattagatggcgtagagattttaacggttactcgacataaccgaaaaattcgcacgggtagccttgaaggaaattatttcgatattttattacgcggtgcagaagaatctgatgagcttaaagcgcggttggattttgtggcaaattttggtttcccaaattattttacggaacaacgttttggtcgggatggccgtaacctcacgcaagcattgcgttgggctcaaggggaaatcaaggtaaaagatcgcaaaaaacgcagtttttatctttccgccgcacgtagtgaaatttttaatttagttgtggcagcacgtattgcaaagggcacaacaaatcaagttttaccaaatgatattgtgcaattagcaggttcgcacagttggttcaaagcggatgaaaaagaagacttaactgccttgcaagtgcggttagaaaatcaagatattttactctctgctcctttaattggcgaagatattttagcagcaagcgatattgaaaatgaaatcgtaaatcaacattcagctttcgattctttaatgaaacaagaaagaatgaaagcagtgcgtcgcccattgttaatgaaagcaaaagggttttcttgggcatttgagccagaaggcttgcgtttaaaattttatttgccagcaggcagttatgccacggcattagttcgtgagttagtaaattacacagaagaataaggaaatataatgcgaattttagttagtaatgatgatggttttcacgcggaaggcattcaagttttagcaacggaattaagaaaaattgcagaagtcattattgttgcacccgatcgtaatcgaagtgcagcatcaagctcgctcacattggttgagccattacgcccacgccatttagataatggcgattattgtgtaaatggtacaccagcagattgtgtacatttagcgttaaacggatttttatctggccaagtagatttagtggtatcaggtattaatgcgggttgtaatatgggcgatgatacgatttattcaggcacattagctgcagcccttgaaggtcgtcatttaggtttgcctgctattgcagtttcgttagatggtcgtcagcattatgaaacagcagcacgagtggtatgtgatctcattcctaaattacatcatcaattattaaaccctcgtgaagtgattaacatcaatgtaccagacttaccttttgaagaattaaaaggttacaaggtgtgtcgcttaggttatcgttcatcttccgttgaagtcattaaacaaaaagatcctcgtgatgaaaccatttattggattggcccttcagcattacctgaagatgaaagcgaaggaacagatttttatgccgtgaagaatggttatgtgtctatcacaccaattcaagcggatcttaccgcatatcattcattgctttctttgcaaaattggttagatcaggaatttaccaaatagagaaaaatatgaaaattttcggcacgatgtacgataaaacgatggaatggtcaaaacatcgttttgctgttttttggctctcttttgtaagttttatcgaggcgatattttttcctattccgcccgatgtgatgttgatcccaatgtctatgtcaaagccaaaaggcgcggtgaaatttgcattttatacggcaattgcgtctgtaatcggcggaattatcggttatgctattggtttttatgcaacggactgggtggaaaacattgtgcaacaatggggatatgctgcgcattgggcaaaagccgtcagttggtttgagcaatggggcgtattagttgtgtttgtggcgggttttagcccaattccttacaaggtgtttacgctctgctctggcgtgatgcaaatggcatttttcccttttgttatcaccgcatttgtttcacgtttagcgcgtttcttgctagtagcaaaattagctgcatggggcggtgaaaaattcgcagcaaaattgcgaaaatctattgagattattggctggtcagtggttgtactggctgtaatcgcttattttatactgaaaacttaggatagaaaatgaacaaattaagtcttgttttagtagctggatttcttttggttggatgtgcatctgaaccagttaaagatccagattcattaccaaatggcattatgcaaccagtagaaggcactggtgccgttactggtggtagttttatgccagaaattcaaaaaaatacgataccaacacaaatgaaataataacggaacaataaggaataactatgaaaaaatcatttctcttactccctttgagtcttgttgtattatcggcttgtacctctaattttcctgcacctatttctgatgcagatggaaatctttcccctagtgtaatacaatctgtaaatggcagtaatgtaggtggtgcttggcaacctgaaattcaaaaaaattcattacctacaacgggaaatatagtcacgccacaaccaaattttcaaccgattaatcaacaaccaacaatgccaacagcacctgcacaacctgcatttcaaccctctccgaaaaccgtagttagtgcaccgacagtacaaacaaaaacagttaccaaaacagtcgctgattgtgtagatggacagcatattaatatcccacgtaatccaaataccaatgtgccagattacagcaaaatctcaaaaggctcttacaaaggcaatacctataaagtaaacaaaggcgatacaatgttcttaatcgcttacttggcggggattgatgtaaaagaattggcggcgttgaataacctatccgaaccttataatttaagtttagggcaagttttaaagatttctaattgtagcacaaaaacggttactacaacggtttctgtaaaacaacctgcagtcacagcatcaacagcaacgccagttaaaccagcagtcacttatactccgggtgcaaacggtactcaaataggatctgacggtactattattggccccattaaatcagaggctggcacatcgcctagtgtacctgtggcaacttcatcaacacaggttacgtcatctgtaaataatgcgaatagcacaccaattaattccaatgtcgttgcgccaatcgcctcaaatgttgtgtggcaatggccgacttcaggtaatattattcaaggtttctcaagcacagatggcggtaacaaaggaattgatattagtggttcacgaggacaagctgtaaaagcggctgcagcagggcgaatagtgtatgcaggcaatgctttacgtggttacggtaatttaattatcatcaaacataatgatgattttttaagtgcctatgcgcataacgacaaaattcttgtcgccgatcaacaagaagtcaaagcaggtcaagacatcgcaaaaatgggaagttctggtacaaataccgtgaaactccactttgaaattcgctataaaggtaaatcagtggatccagtacgttacctaccaagacattaatcttcctgtaaaaagtgcggtaaaaaatctcaataaattttcaccgcactttttttattaaaaatattctgtgaggaatatcacaaaataaaaaaataatagatgacaatgttaaattttatattattctgataatacttcgtagttagaagtcagtgttaagttttattaagtatctcttctcttaaaaggagtttaatatgctcaacttgctttctcctaaccaaacttgggttcttattgatccaagattatctttttattttcccataatttattaatcctttcttattaaccatcaaagtgttttcattttagaaaatcattttttatttaaactaagcaaattaatttttggggattttgctatggaaaattttaaacatttacctgaacctttccgcattcgtgttattgaaccagtaaaaagaactactcgtgagtatcgtgagcaagcgatcttaaaatcaggcatgaatccatttttattggatagtgaagatattttcattgacttacttacagatagcggtactggtgccgttacacaagatatgcaagctgcaatgttacgtggcgatgaagcctatagtggcagtcgcagttattatgcgttagctaaagcagtgaaagatatttttggttatgaatatacaattcctactcatcaaggccgcggtgctgaacaaatttatattccagtattgattgctaaacgtgaacgtgagaaaggtttagatcgcagcaaaatggtggttttctctaactatttctttgataccacacaaggacatagccaaattaatggggcaacggttcgcaatgtttatatcaaagaggcatttgatacaacagcaaaacatccatttaagggtaatttcgatttagaaaaattagaaaaaggcattcaagaggcgggagcacataatgtaccttacattgtatgtaccattacttgtaactctgcgggtggtcagccagtttctattgcaaacttaaaaggcatgtatgaaattgcgcgtaaatacgatattccagtcatcatggattcagctcgttttgcagaaaacgcctattttgttcaacaacgtgaagaagcttataaagactggactattgaacaaattacttacgaaagctatcgctatgctgacggtttagcgatgtccgccaaaaaagatgctatggtgccaatgggggggattttagcgtttaaagataaatcaatggaggaagtctatcacgaatgtagaacgctttgtgttgtgcaagaagggttccctacttatggtggtttagaaggtggtgcaatggaacgcttggctgttggcttacatgatggtatgcgtcaagaatggctggcttatcgtattgcgcaaattgaatatttggttgcaggcttagaaaaaattggtgtgctttgccaacaaccaggtggccacgctgcgttcgtagatgcgggtaaattattaccacatattccagccgaccaattcccagcacaagcactttcttgcgaactttataaagttgcaggtataagagcggtagaaattggctcatttttattagggcgagatccgaagacgggtaaacaactaccatgtccagcagagcttttacgcttaactgtaccacgtgcaacttatacgcaaactcatatggatttcattattgaggcgttccaaaaagtgaaagaaaatgcggagaatattaagggtttaacctttacttatgaaccaaaagttctccgccactttacggcacgtttaaaagaagttgaataatatcacgaaaaatgcagttcattttgaactgcatttttttatcaacagctaactcaataatttgttattgataaggatgttctatgaaaaaacaaccttccatttttggtggcgcctgtattattgctagtgtttgcgtcggagctggaatgcttggtttaccaacatctggtgctggagcttggacaatatggtcagcattagcaatttgcttaacgatgataatcatgacattatcaggctggttattacttgaggcctattctacttatgatttaagagcatcatttagtaccgtaactaaagatatgctcggttcaactatcaattctattaataatcttgcggtgtattttgtcgggggtattttactttatgcttataccactgcatctggaggtatactagaaaaccttattaaaccgtggattgattttggttcatctacattggcaatttgctccactgtatttgtattagtcttttccttctttgtttggcattccactcgcattgtagacagaatatctgttttattgattgtattcatggggtttacttttatttttagtacttatggattagcaactaatattagtttagatactttattagatattggtggaaaagatacaaactatgcaaaatatgcggtagggatgtttcctgttgcattaacatcttttggttaccatcattctgtttgtactatgcgagcctattatggagacgagaaaaaagctaaatatgccatttcaggtggaacagccattgctcttactctttatttactttggattttttcaattttcggaaatttgcctcgcaatcaatttgcacctgtaatagctagtgatggcaatctagatatattacttaacgctttaggtagagtaatagaatctaacacggttaaacaaatgattaatgccttttctatcgccgcaattttgtcatcttttattggcgtaggattaggcgtattcgattatctcgctgatttcttcaaatttgataatagcaaaattggacgaacaaagtcatgggctgtgactttcctacctccactaattatgtcaattttatttccattgggtttcttaaaagccattggatatgccggcgcagtagcgacaatttggacttgcataattccagcacttcttgcttataaatctcgcaaaataaatgcagcagcaacaacattccgagtttgtggtggaaatggcttaataatctttattgtattatttggtgtttttgtggctattttccattttctagcaatgtttgactatttgcctgtctttaaaggataaataccaacctcaagtgcggtaaaaaatctcaacaaattttcaccgcacttttttatctagctttttcccctttcggcacctaaaataaccgccacaaaacctatctttattcagtttcaaagcaggtaattagatgatttccgaagaaaatttccaacagcacacgccaatgatgcagcaatatctaaaactcaaagcggagaatccagatattttgttgttttatcgcatgggggatttttacgagttgttttatgacgatgcgaaaaaagcggcagcattgttggatatttctttaacgaaacgaggtcaatctgcaggacagcccattccgatggcaggaatgccttatcatgcggtggaaggttatttagcaaaattagtgcagttaggcgaatctgtggcgatttgtgaacagattggtgatccagccacaagcaaagggccagtggaacgtcaaattgtgcgaattgttacacctgggacagtaagcgatgaagcgcttttgcctgaacgccaagacaatctgattgctgcggtatatcaagagaaagaaaaatttggattagccactttagatatgacctctggccgttttcagctttgtgaacctgcggacaaagaaactttgcgtgcggaattacaacgtattgcacctgtggaattgctgtattgtgaagaatttaatgaaatggctgccatagaacattgtaagggattacgacgtcgcccgatttgggaatttgaacttagcacagccattacgttattaaatcgccaatttggcacaaaagatttacgcgcctttggtgtggaaaaatcccctctaggcttaagtgcggctggttgtttattgcaatatgcaaaagaaacccaacgtaccgcattaccccatattcaaagcattagtttgattcaaaatcaagactgcattcagttagatgccgccactcgcagaaatcttgaattaacacaaaatcttgcaggtggcacagaaaatacgctatcgtctgtattggataaatgcgttacgccaatgggcagtcgcttattgaaacgttggattcaccagcctgttcgtgatgtggaaaaattaaaacaacgccaacaatcgattgcggaaattctgaattttgatttagtcgatgaacttcagccttatttgcaattagtcggtgatatggagcgtattttggcacgtgttgcgctacgttcagcacgtccacgcgatctcactcgcttacgcacggcgttagaacaaattccagcattacgtacgattgtgcaacaaaaaacaccgccatttttaaccgcacttttcagccaaattgctgatttcagcgagcagtgcgatttattgcaacgtgcattgattgaaacgcctccgcttttaatccgtgatggtggcgtgattgctaaaggatacaatgcagagttagacgaatggcgtatgctctctgatggtgcaactcaatatttggaaaatctagaaaaacgtgagcgtgagagcacaggcattgatacgttaaaaatcggttttaatgcagtgcatggttattacattcaaattagccaaggccaagcacataaagcgcctattcattatgttcgccgtcaaaccttgaaaaatgcagagcgttacattattcccgaactcaaagaatatgaagacaaagtgctgaaatcaaaaggcgcagcgttagcattagaaaagcaactttacgatgaattatttgatttattattaccgcacttaggcacgttgcaactggcgagcctcgcactttctgaattggatgtattggtcaatcttgccgagcgcgcagacaccctcaattacgttatgccaacattctgtgatgaagtgagtgtgaaaattaaaaatggtcgccatcctgttgtggaacaagtattgaaagatcctttcatcgccaacccagtggaactcaatcacaaccgtcatttgttaattatcactgggccaaatatgggcggtaaaagtacttatatgcgtcaaaccgcattaattacattgctggcgtatatcggcagttttgtgccagcagacagcgcgcgaattgggccaattgatcgtatttttactcgaattggtgcgtctgatgatttagcctcggggcgttcaacctttatggtggaaatgacggaaatggcaaatattcttcatcaagctacagcgcaaagtctcgtgcttattgatgaaatcggtcgtggcacatccacttacgatggcttatccttagcttgggcttgtgcggaatggttagccaaaaaaatccgctcgcttacattatttgccacccattattttgaattaaccgcattaccggaacagctagatggtattgccaatattcatttagatgctcttgagcataacaacagcatcgcctttatgcacgctgtacaagatggcgcagcaagtaaaagttatggtttggcagtggcagctttggctggcgtgccacaatctgttattaaactggcaaaacagaaattgacacaattagaaaaaaactcaagccattcagccgatcaacaaattcaagcattgcgtgaagccaatcacaatcagggcgaattattgtttgaacaagaaacggacgcactaagagaggctattgaaaagctggatcccgatgatttaagccctaaacaagccttggcgtatttgtatcagttaaagaaaatggtggggtaaatattatatcccagcgataaattcaaaggtttacggtgctttatccaccatacgcaataataaagccttattctaactgggttttgctggtggattatttacgtggatttatgcaggtttatatggattggcggaggggaatgggagttgaacccacccaagaacgctggcgtcctcaacaggatttgaaatcctgccacctcaccggagatgacgcccctccgtggttgaaattgcggtcactttagcgtaaattaatcggcaattcaacgttattttaaacggattcaaaaatgaccgcactttttcaacaacttccttccgttgataaaattctcaaaacacctcaaggcttacaactcattaccgaatttggtcacactgcagtcgtggcaatatgtcgagaattattaacccaagctcgtcaatttattcaaaaaaataaccaacttcctgaatatttttctaattctgaccgcacttttgtagaaattcattctcgcctacaaaaacaaaaccaagtacaaatcaaagcggtgcataatctgactggtacggtgttgcacacaaatcttgggcgggcactttggtctgaagcagcacaacaagcagcactttctgcgatgcaaaaaaatgtgtcgcttgaatatgatttagatgaaagtaagcgtagtcatcgcgataattacatcagtgaattattatgcaaactcacaggtgcggaagccgcctgcatagtgaataacaacgctgctgcggtattgttaatgttagcgacctttgctcaaggtaaagaagtaattatttctcgtggcgaattaattgaaatcggtggtgcatttcgtatcccagatattatggaacaagctggatgctatttagtggaagtgggcaccactaatcgtactcacctgaaagattatcgtaatgctatcactgaaaatacggcttttttaatgaaagtgcatagcagcaattatcaaatttgtggttttacctcttcagtttcagaagaagagcttgcggaactaggccgagaaatgaatgtacccgtagtcactgatttaggcagcggcgcattagttgatttaagccaatatggcttaccaaaagaaccaaccgtgcaagaaaaaatcgcacaaggtgtggatttggtctctttctctggcgataaattgcttggtggcgtgcaagcaggcattatagtgggtaaaaaagcatggatcgaacaattacaagcccatccactcaagcgtgcattacgttgcgataaagttattttatcaggcttagaagccacattacgtttatatttaaaccctgaaaaattaactgaaaaattaccgactttgcgattactcactcagccattagaacaactcaaaataaatgctacgcgtctcaaagagcggttagaatctcgcttaaattcacaatttgagattcaaattgaagttagccaagcacaaatcggtagcggctcacaaccaatggaaagaatcccttccgtggctgttactattgcagaaaaaacaaacgtaaaactttccgcactttcggctcgttttaaacaactttctcaacctattattgggcgaatggaaaacggaaaaatttggctagatttacgtagtcttgcagatattgaaacattattaaatacattggatgaactatgattattgttacttcaggtcacgttgatcacggcaaaacagcattattaaaagcattaactggcaaaagtaccgcacatttaccagaagaaaaaaaacgcggaatgaccattgatttagggtatgcctatctgccgttagaaaacaaagtgcttggctttattgatgtaccgggacacgaaaaattcttgtcaaatatgcaggcaggcttaggtggtgtgcattatgcaatgttaattgtggctgccgatgaaggcgttgcaacgcaaacgaaagaacatttagcaatcttacgccagcttcaattccacgaaattattgttgtcatcacaaaagcagatcgtacaaattcagagcaaattgaatcgttaatccaagaaattaaacaaaattatagttttttacgtggtgctaattacttcgttacctcagcagaaacgggacaaggcatcagtgaattacgtcattacttagctaatctacctgaattatctgatacccagaaacctttccgttacgcaatagaccgagtattcaacgtaaaaggggcgggtaccgtcgtgacaggcacagccttttcagggacagtgaaagtaaacgatgaaatttacctttccactggacagaaagttcgtgtaaaagcgattcacgcacaaaatacatcaagcgaacaaggtattgcggggcaacgtttagcgttaaatttaaatgctgatttagaccgcacatcaatgaaacgaggtgattggttattgcagaatgagccacttccaccaacagatcgcatcagtgtacaaattttggctgaagtaccattaaatgaaagccaacctgtgcatatttatcacggcgcaagtcgcactacgggtaaactcaccttattacagggaaaaaatgccgcaaaaaatgaccgcactttggctgaaatcatattagattcgccattattcttggcttttggagacaaacttattttacgcagtggcgatacaaaaaccttaattgccggcgcacgagtattggaaattaactcgccaaaacgtcataaacgtactgaagtgcggttaaatttcctagcgaatttagcattggcagagaacgcttcgcaacgtattgcgcttacccttaaacataatgcgacaacagcacgccaattaatgtggatggaacaactgacttccttgcaattagataaagcactcgtcgagcgagacgccgtacgttatcaagattggtgttttaatactaattacatacaagaaaaaacacagcaaattttaaccgcacttaatacttatcacgagcaacataatgatcaacttggtgtaagcaaagccagattatatcgaatgactgccttaaaccagcctgaaaacttgatcaatcattttattgatgaaatgttagaagagggaagattacagcaaactcgaggttggcttcacttacccgaacataaaatccaatttagccaagaagaacaaaaatattggtcaagtgtactctatgaatttgaaaaagcccaaggtcaagccatttgggtacgtgatatggcaaatgcactcgctattgatgaatcaattatgcgtaattttatgtataaagcagggaaattgggttacctcacaccaatcgtgaaagatagatttttcttaactgaaactatctatgcttatgcaagacttattaaacaaatcgcacaagaacaaggaaaagtttccgtaaatgaagtacgtgataaattaaatttcgggcgcaaacttaccgttcaactgatggaatatttcgaccgaatgggatttttacgtcgcaaaggcaatgaccatattctacgcgataagaatgtttttgatttatgatttaaaaaggaaaaaagtatgaaaaaaacgctcgttgctgcattaattagttctgtcatcttactcacaggctgccaagataaagatactgaagcaaaaataaaacaactaaatcaaacagtagcacaactcaatgctgaaaatgccaaattaaaacagcaaatagaaaaaacagtcccagcaatttttgtggaaaatgatgaaatatttaatcaatctgaaattattaaacatcctaaatcgaaagaagattaccagcctgaagaaaccaaaattgagtattcaatttcaacaataaaaaccaatattgattggcttaatgatctattgtggaaaaaattgactgaaaatgaagaaacgaaaaatatttctcgtgaacaatttgtagcacgttatcaaaccgcttttgaggaagacaaaaaagaggcgaaagaaacaccatcttttggaatttctcattctatatggacaaattttatcgggcaaaaagaaaaacttgcaacctttgcgattagtttttatgactatgaaggtggtgcgcacggtattgaaggtaatcgctatttcacgattgatctaactacacgccatattttgacattaaatgatttatttaatgaaaaagatttaccgaaagtaaaaacgcttttatgggaacaatataataatagcaataaggaatatgaacctattattgaagccgatagttttaatttatcgaacaatatttacttagattcaaaaggtgtacattttatttatgatgtttatgaaattgccccttacgcagcaggagagcaagatttaatgctccattttgggcaactagaagaattatttaaaccagaatttagacagggtaatgatatttaaattctttaacttttgaatagcaatcaaaatccctaattacattaaaaatgagagactatagattttgcacttcacttttattataatagtctttcaatgtaatactaaggagaaaaattatggcacttacgaattcctctatcagctttagaacagttgagcaaacaaaatcagaagcttatcaagttattgaacaatatggacttaccccatcacaagtattcaatatgtttttggctcaaattgccaagactcgttctatccctattgatttgaattatcttcgcccaaataaagaaaccctagcagctattgatgaattagatagtggtaacgcagagagcttctttattgaagctagtgaaaattattctgccgaagaatttacaaaacgcattcttaatggtggtcaataatgtcagaagagaagccattaaaagtaagctattcaaaacaatttgtaagagatttaactgatttagctaaacgctcccccaatgtgttaattggctcaaaatacattactgcaatatactgtttattaaatcgtttacctttacccgaaaactaccaagatcacgcattagtaggagagtggaaaggttatcgagattgccatattcaaggcgatttggtactgatttaccaatacgttatacgcgatgaatttgatgaattgaaattttctcgtttaaatacacactcacaaaccgctttaaaatagaagtaatcttaaacaataatccgcacgtaaaatgtgcggattatttttacatagcattaaaactcaaactgaacagacattctgtaatttctgccaggtgcgtagaagcggtttaagccttcacctgttgctgtttttactcggttaattgtgccaagatgtcgaacagagcgagcagagtcccaagtgagatattttttattggttaaattatacacaccagcggtaaatgtaagatttttaattggtttccaataagcaatcgtatcgatcactgtatagcgattattacgccataatccgcgagaatcttttacttctttgccgtttgcttttgatgctggtacatcttttgcttcgtcggtatattgcttttcttttcgttgaaccatacttgtccattgagaattaaagctgtcttttgcttttttggctgcaacattagtgatatacacatccatgccccatttttggcttggtgcatcatagccaatattatataccgatgtggttggttgtaaggcattcattggttgaggtttacgagcaatggcttcgtattctggatgttgagctttattcaattccaaaaattctttatattttggatttaatccattgtctttaattctgcctttttgataggtaaatttatagcctaaatggaatccttgtagtttttcaaacaaatcgcccatttcaagacgtgaagcaatttcgatacctctgactcttgctcgatctcgattttggttctgatggaacggataacgaataacagagccttcttcaataggacgttcgcctacttctactagatcaataaaattatgataatcgttttggaatgcatttaacgtaatataactgctgtttttataaaaagtgaacgcgacttcttttgttttggaggtttctgcttttaaatctgtgttaggctgaatggaaaattgtggatgtttaaatgtcatataaatttcatcagaggttggcgcacgaaaaccattggcgtatttaagttgtacacgaagccaatctgtgggatcaagatttaaccctaaattgtaagaatgatgtttatagtcagttttgcgtaataacagggcaagattgtctttaaaattttgtttataacactctgtggtgtaagtgcaatcagtatatcctgcaggcttcgaatatttactaccataaacatagtcttttaagccaaatttcttaaatagcccagtaattaatccattaggaactggaatgttttcgtcataactaggtaaatattttacgtggtcatagcgataatttaaatctagtcctagccaagaggttagttgcatattgtctccaaaatacaacacattatttttagtcgttacagggattaaataggaatctttgcctttattagtattcattaagctacatctgtaagcactataatcaggtgcaggagtatgctccacaggatatgtgccatctacaggtttgttacagaaaaaattgccagcccaccattgcacattggcaacagtgttgtattgatgattcaccatactttttagtgttttttcataaagaccaccatattttagttggtgttgggtatgccaaaggctaaattctttatctaaatcaagcttaatttgttgggtgttggtgtttaaatcacgatcattaacggagtctgtactatagccagaactttttggaaataaaaatttagcactttcatattgggttaaataagtaccgttttttgattttagtgggatttcgccatatttttttccattaggtaatgttttaacttctattggtttattctcataagtgtatttgctattgtagttttcatcgttttcaacaaaaacccgaaattttttattttcacaatttaatttttcacaattaattaaaacagaatcaagtgcccctccttctgtatctacaccattactaacatcttcatccttgtggttttttagttctaagccataattatatgttcctgtaaattctctattatctttatctttaatcttgtaaacgccctcctcttctactaaatgtagcccttgagggttgcttacaccattacaagtaggttgatgacaatattcatcagaacgtgctttattggtaattttttgtgaagaataacttagtttaatatgatcccaaaaaggggtttgggtgaagttttcataactaaattggatattttttcttttagattgatcattaataactcgctcgccatatgtttccgcacatgtactatttctgcattgattgaaaatataagataaatccataccctttgtttctaaagtggaatcatctaatgccacactcaaacgatggttttcattaggctgaaagcccagttttattaaagtactttggcgggtaatttgatacggatcggctttttcacgggtaggaccaaccgcactaaaatcagtctgtttattgggataaattttataatcgtagttttctatttcgtgcccatcacgttttgtatcaacgactaaaatatcaaattttttataacgtcctgcgaatgtaagtgcattaaggttttgattattcattgtttgatagccacgtttataggaaagataataatctttatctagcagataatctcgagcatctttagtttcaaatataacagagccacccaatgcgccactaccggattttaaggagtcagcacctttggtaatagttgctgttttaacattttcaatttcaatgctattacgagtattattaaaattgccatagccttcaaatagttctttaaatccttgagagcttaaagtttcagcttgacgaagcccatcaaccataatacctacacggttttcatcaacccctcgaactgcataaccacttgcgcccgttctaccagtttcaactaccgtaatacctgtttcatagcgaacgagatcacgagaatcagacgcctgctgtttcgctaattttttagcagaaatttgggtttccccgacttttttctctttgatattaatattttctgatgaacctgaaacattaatttgttctagttgttcagaaacattactattttggttggttggttggttggttggttggttggttggttggttggttggttggttggttggttggttggttggttggttggttggttggttggttggttggttggttggttggttggttggttggttggttggtnnnnncattccattcattaattaattaatgaatgaatgnnnnnttaatgcaaatgcaatagagcaagcaagcaggctgaatttaaagttggtcataggtttccttatttttaatgataatagttatcatatatattaaataattcaatttatttaatcaatatcaaaatgaaaaagtataataagtacaaaatccaaattgctttgtatcagcataaaagaaaatcattttgaccgcacttttgtttgtaagtcgtattttaaaatcatcaaaatgcaaattttaatcactcttttatcgactgcgtagatttctttcgttataattgagcgtctttttatttaacaaacgtgttcggtgtggattttgaccgagtgcaaattaattgaggtaacaaatgtcattaaatattgaaacaactcaaggtttagaacgtcgcgtagcgatcaccgttccaactgaaattgtctctaaagccattcgtgaagaatttaaacgtgctgcaaaaaatgtgcgcgtagatggtttccgtaaaggtcatgttcctgcccatatcattgaacaacgttttggggcgtcaattcgtcaagatgtattaaacgatttattaccacgtcatttttttgatgctgttattgcagaaaaaattaatattgtaggtcgtccaacttttgcgattgaaacttttgaagaaggtaaagacttagttttcaatgcaactttcgaggtttatccagaagttaaattacaaggtttggaaaatatcaaagttgaaaaaccaactgttgaaatcacggaagctgatattgataaaatgatcgatgtgttacgtaaacaacaagctacttgggctgaaagtcaagatattgcaaaagcagatgatcgcgtcactattgattttgttggctctgtagatggcgaagaatttgaaggtggtaaagctactgacttcgtattatttatgggtcaaggtcgtatgatccctggttttgaagaaggaattgtcggtcataaagtaggtgagcaatttgatattgatgtgattttcccagcggaataccacgcagaaaacttgaaaggtaaagcggcaaaatttgcgattactttgaaaaaagtcgaaaatatggtattgcctgaattaaccgatgagtttgtcgctaaatttggccctaatactaagtctgttgctgatttgcgtgcagaaatccgtaaaaatatggaacgtgaattgaaaaatgcgttagtttctcgtgttaaacaacaagtaatcaatggtttaattgaacaaaatccgattgatgtacccgcttctgcagtagaagaagaaattaatgtattacgcaatcaagcggctcaacgttttggtggcaatacacaacaagctgcacaattaccacgtgaattatttgaagctgaagcaactcgtcgtgttcaagtaggtttattattctctgaagtgattaaatctaatgaattaaaagctgatgaagaacgtgctaaagcaatgattgcagatattgcatcagcttacgagcagccagcagaagtggtggaatattacagcaaaaacgaagagttaatgaataatattcgtaatgtcgtattagaagaacaagctgttgatgcagtacttgcaaaagcacaagtaacagaaaaagtttcttcattcgatgaaattatgaatccacaagcataataagtaatatcattatgattgaataaaagtgcggtcgctctttttaataaaagcgatcgcatttttatttgtgggttatttacgataaaataattagcagttttaatgaaaaaggtaagaaaatgagtgtaattcctatggtcgttgaacagacttcgcgtggcgaacgttcgtacgacatttattcccgtttattaaaagaacgtgtgattttcctaagtggagaagtggaagatcgtatggcaaatttaattgtggcacagttgctttttttagaatcggaagatccaactaaagatattaatatttatattaactctcccggaggttctgtaaccgcaggtatggcaatttacgacacaatgcaatttattaagccagatattcgcactctttgtattggtcaagcctgttcaatgggcgcattcttgcttgctggcggaactgctggcaaacgagctgcgttgcctaatgcacgagtgatgattcatcaacctttgggtggtttccgtggtcaagcatcggatattcaaattcacgcacaagaaattttgaaaattaaacacaccttaaatgatcgtttagcattccatactggacaaagtattgagcgtattgagaaagataccgaccgcgataattttatgtcagctgaagaagcacaagcgtatggtttggtggatgaagtcttggttaaacgttaagggtatacaatgacagacaaagataaagatttgcactgttctttttgcggaaaagaaaaaggcgaagtagataaattaattgctggcacagacggttatatttgtaatgaatgtattgaactttgtcactcaatgcttgaagaaagtaatgatgaaaatttagaggaaagtgcggtcgaaaataaagataaattgccaacgcctcacgaaattcgcgcccatctggatgattatgttatcggtcaagattatgcgaaaaaagtgctttctgtggcagtttataatcattataaacgcttgcgaactaactatgaaagcaatgatgtagagcttggcaaaagtaatattttacttatagggcctacaggtagcggaaaaacgttacttgcgcaaacattagctcgtcgtttaaatgtaccctttgcgatggcggatgcaaccacattaacggaagctggttatgtgggagaagatgtggagaatgtattacagaaacttttgcaaaattgtgaatacgatactgaaaaagcagagaaaggcattatttatattgatgaaattgataaaattagccgtaaatcggaaggcgcatcaattactcgagatgtttcaggggagggggtgcaacaggctttattaaaacttattgaaggtacaatcgcttccattccacctcaaggcggtcgtaaacatccacaacaagaaatggtaaaattggatacgtctaaaattctctttatttgcggcggtgcatttgcaggattagataaaattattgataaacgcactcaaaccagtacgagtattggttttaatgccaaagttgaaaaagatgaaaaacaacaatctctttctgaattattccgtcaagttgaacctgatgatttgatgaaatttggtttaattccagaatttattggacgcttgccaatgattgccccattaagtgaattagacgaagatgcgctgatacaaattctcacaaaaccaaaaaacgcattaatcaaacaatatcaagccttatttggattggaaaaagtagaattggatttcacaccagaagcattaaaagcaatggcgaaaaaagcacttgaaagaaaaacaggtgcgcgtggcttacgttctatcgtagaagcagtgttgttagatacaatgtatgatctaccgtctcttgagaatttacaaaaagttatcgttgatgaatcgacaattgtagataatcttgcgcccaaattagaatattagatttaatcgcaaaagtgcggttgttttcgccagattttctatgttgatgcttattttcaataggcaaggcgaaaagaaaatgctacaatcgcacgttcttatggcattattcttacacttccatttaaaacggattcaattctatggcaaccgaaattgttgataaaaagaaaaatacgcaagaagtgatcgttgaaggcaagtctaaaggtttaaatacattcctttgggttttagctgtgatcttttttgcagctgcggctattgggaatatttatttccaacaaatctattctttaccgattcgtgttattggtatggctattgcgttagtcattgcatttattttagcggcaattactaatcaaggaacaaaagcacgcgcattctttaatgactctcgcacagaagcgcgtaaagtcgtatggccaacccgtgctgaagcacgtcaaacaacattgatcgttatcggggtaacaatgattgcttctctcttcttttgggcagtagattcgattattgtgacagtaattaatttcttaactgatttgagattctaaaatgactgaagaaacaacagtatcaaaaaaacgttggtatgtattacaagcgttttctggctttgaaagtcgtgtagctctaactttacgtgaatacatcaaacaacaacaaatggaagatcaatttggtgaagttttagtgccaactgaagaagtggtggaaaatgtagcaggaaaacgtcgcaaaagtgaacgtaaattttttccaggttatgtacttgtagaaatggaaatgaatgatgaaacttggcatctagtaaaaagcgtgccaagagtgatgggttttatcggtggtacaccagataaacctgcacctatttctaaacgtgaagcagatactattttaaatcgccttgaacaaaatactgataaacctcgtcatcgtaatgaatatcatccgggtgaggaagttcgtgtgactgaagggccatttgctgattttaatggtacagtagaagaagtggattatgaaaaaggtcgcttaaaagtctctgtatcaatttttggtcgtgcaacaccagttgagcttgaatttggtcaagttgaaaaaatacactaagaaataattaaaagataaccgcacttttgtagtgcggttttttgtttttaatgtttgtttaaacagcataaaagagtatttttatacgcaaaatttgttgtcatttaacaaattaggtagaataatcccacatttatataaggatcaaaaatgaaaacaaaggcaattttgaccgcacttttgggtgccattgcactaacaggttgtgcaaataacaacgacacgaaacaagcgagtgagcgtaatgattcccttgaaggcttcaatcgaactatgtggaagtttaactataatgtgctagatcgctatgtattagaacctgttgcaaaaggttggaacaactatgtgcctaagccgatttcttctggtcttgctggcatcgcaaataatcttgatgagccagtcagtttcataaaccgcttaattgaaggcgaaccgaaaaaagcatttgttcactttaatcgtttttggattaacactgtatttggtctaggtggttttattgattttgcaagcgcaagcaaagaattacgcgtagataatcaacgtggatttggggaaactttaggcagttacggtgtagatgctggcacttatattgtgctaccgatttataatgcaacaacgccacgtcaattaacaggtgcagtggttgatgctgcttatatgtatccattttggcaatgggttggtggtccgtggtcgttagtgaaatatagtgtgcaagcagtggatacccgtgcgaaaaatatcaataatgcagaattgttacgtcaagctcaagatccatatattacgttccgagaagcttattaccaaaatttacaatttaaagtaaacgatgggaaattagtcgaaagcaaagaatcacttcccgatgacatactaaaagaaattgattaataaacagaaaagtgcggtaaaaattacccaattttttatcaactaaggagaaaataatgactcaaattattcatactgaaaaagcaccggcagctattggcccttatgttcaagcggttgatcttggcaatttagttttaacctcagggcaaattcccgtgaatcctgtaacaggcgaagtgccagctgacatcgttgcacaagcacgccaatctttagaaaacgtgaaagcgattatcgagaaagcgggtttaaccgcagccgatattgtaaaaacaacggtttttgtgaaagatcttaacgacttttcagcagttaatgcagaatacgaacgtttctttaaagaaaataatcatcctaacttccctgctcgttcttgtgtggaagttgcgcgtttaccaaaagatgtgggattagaaatcgaagcgattgcagtgagaaaataattttctattttgaacccttgtttaaaagtgcggtcataaactcgcaagtttttgaccgcactttttgtttatctgctgataacaaaaattttacattacaccttgaattttttgtgaattttccccacaaaggaaatacttaaccctaactttgagagaacacattatgatgcgaattcttcttttcttggcaaccaatatggctgtaatgctggtattggggattattttaagtgtgactggtattgcaggaaatagtactggcggcattttaattatggcgttgctatttggttttgctggttcattaatttccttattcctgtctaaaacaatggcattacgttctgtagatggagaagtgattactcaacctcgtaatcaaactgaacgttggttaattgataccgttagtcgccaagcgcagaaagcgggtattcccatgccagatgtggcaatttatcattcacccgatgtgaatgcttttgcgacaggcgcgacaaaaagcaattctttggtagcagtgagtacgggattattaaacaacatgacggaggctgaagctgaagctgttttagcgcacgaaatttcccatatttccaatggggatatggtgacgatggcgttattgcaaggcgtattgaatactttcgtgattttcttatctcgtattattgcaacggcggtggcaagttcacgtaacaataatggagaggaaacgcgcagttcaggtatttatttcttggtttctatggtattggaaatgctctttggtgtgcttgcgagtattatcgcaatgtggttctctcgttaccgagaatttcgtgcagatgctggttccgcaagtttagtaggcaaagaaaaaatgattatggcactgcaacgtttgcaacaacttcacgaaccacaaaatctcgaaggttctttaaatgcctttatgattaatggtaaacgcagtgaactctttatgagccatccgccacttgaaaagcgtattgaagctttacgtaatctttaaaaattataaaaaaatcggccgcactttaatgacggctgattttttattttccttttttcacccaatatttaaacggtggtttttccacttcactttgcagtaaggtatgatccataaattgacagaaacttggaatatctcttgttgttgcaggatcgtcagcaataataaaaagtatttctccatcgttaagatgacgaatatttttacgaacaagcatcacaggttctggacaacgtaatcctaaagtatctagggtttgtgtgacggaaatttcagacatattcttttttcttttgaaaaacagagccatatcataccgcacttacggcaaaatttcgacaaatcccagtcatcagtgatagactagtgtcattgaaattaccttgaaaaaagaaatggcggaatacctcgttcctaaaagtgcggttgtttttgaagaagaaattaagaaaagccgttttattacttatttacagcataccgaaggtttagaagatgcaagagctttttgggcaaagactaaacaagaacatccaaatgctcggcatcattgttgggctgccgtagcaggtaagccaacagattctctacaacttggtttttctgatgatggcgaacctgctggaacggcaggaaagccaatgttgagtgcattgcaaggtagtcaattaggtgaaatcagtgcggtggtggttcgctattatggtggtattttgcttggaacgggcggattagttcgtgcttacggtaatggcgttcaacaagcgttaaagctgattgaaagcgaaattaaagttgaacgaacccctttcaaacttgattgtgactatagtcagctaaatttggttcaacaactttgtgaaaaatatcaggttgagattttatctcaagattttcaggtagatattcatttgattttaggtattagtgaaaaaacaatagaggcgttttcttcagaattaacggaaaagtcttcaggtagattagttattcaacttttagagataggcgaatagttgtgcgtattttatcgattatccgaattattggtattcttgtgatgtgtttttcaggtacgatgctagttccggcatttgttgctctgatttatggcgatgggggcggtaaggcatttatgcaggcttttgtgttgagtttgacggcaggcacattgctttggtggccgtgccatcaccataagcaagaattacgatctcgtgatggttttttgattgttgtggctttttggttagttttaggaagtttggcaacattgcctcttttattatttgattcaccgcatttaactattgcttcagccgtatttgaagcattttctggcttaactactacaggtgcaacggtaatgacggggctggataatttacctaaatctattttgttttatcgccagtttttacaatggttaggtggtatggggattatcgtattggctgtggcgataattccgctgttgggaattggtgggacacaattatatcgagcagaatcttcaggccctcttaaagatcaaaaatctttgcctaaaatttcagaagtggcgaaagctctatggattatttacgcttcattaactgttctttgtgccattgcatattggctgtcaggaatgaatctttttgatgccattgggcatagtttttcaacaatttcaaatggaggattttcaacgcacgatgcaagtatcggctattttaatcagccctctatctattggattacaacaatctttatgctaatttgtggtgtaaattttaacctgcacatttccgcttttcttgcactaggtaaaagaaatatttggcgaaattattggaaagatcccgaatttcgtttttttctaacaatgcaaattatttttattggtattgtatctctatctttatatagttacggtttagtttcagatatgaacgaggctctaacaaaaggtgcattacaattaacatcaatgtcaatgactgctggttatacgatttttgatattgataatcttcctccttttattggacttttactggtaatttctgcggtaattggcggttgtggcggttcaacaactgggggattaaaagcgatacggacacttatattgtggaaacaaatcgatcgagaactgcatagtttaatccatccaaatttagtacaaccaattcgaataggtaaaaatcgtctagcaccaagaatgatagaaagtatttgggcatttttcattatttttatactggtttattgggggtgtgtttttgctgttattctttgtggaatgaatacttttgatgcgatgggagccgtattcgccacattaacgaatgcaggaccgggacttggttttattcacgaaagttttattggtgttccagaaagtgctaaattagtctttagttttgctatgatctgtggacgtttagaaatgttttcattaatcgtgctgtttattccaagctattggaaaaaataataattgaaaaattattgtatttttgaccgcactttttaataaaatgtttatatttccatcaaaagatcatttttttaaatatttttacaaaaaagtacttgcaagggatttgaaaatccctataatgcaccgcacacaacgacgcactgttgtgaatttttttaagtttccaagtgcgtcgttattttttgctctttaacaatatatcagacaatctgtgtgggcacttgttgattgacttgttttaaaaatattttttaattttgaagtcttaataggtgcttaactgaaaattcatcattactttttttaagtagtgttttatgtatagctaagcagtttattgagcgattgaacttgaattgaagagtttgatcatggctcagattgaacgctggcggcaggcttaacacatgcaagtcgaacggtagcaggagaaagcttgctttcttgctgacgagtggcggacgggtgagtaatgcttgggannnnncattccattcattaattaattaatgaatgaatgnnnnncggtcggacatcgtgaggttagtgcaatggtataagcaagcttaactgcgagacagacaagtcgagcaggtacgaaagtaggtcatagtgatccggtggttctgaatggaagggccatcgctcaacggataaaaggtactccggggataacaggctgataccgcccaagagttcatatcgacggcggtgtttggcacctcgatgtcggctcatcacatcctggggctgaagtaggtcccaagggtatggctgttcgccatttaaagtggtacgcgagctgggtttagaacgtcgtgagacagttcggtccctatctgccgtgggcgttggatgattgattggggctgctcctagtacgagaggaccggagtggacgcatcactggtgttccagttgtctcgccagaggcattgctgggtagctaaatgcggaagagataagtgctgaaagcatctaagcacgaaacttgccaagagatgagtcatccctgactttaagtcagtaagggttgttgtagactacgacgtagataggtctggtgtgtaagtgtagtgatacattgagctaacagatactaattgcccgagaggcttaactatacaacgctcaagtgtttttgggagctaagtgaagtaagagatgaaaagcgaagcaaataaaagtagagcggaaaccgaagtaaaagactaaacaaagaaaagtaagtatagaagacttaatagaaagaaaattgagttcagcttgtgaccaataagaacgagtgaaaggtagaggaaagactgagtaacgagagataaaagagacgagagataaaagagaaaagacgagttatcaaagaattatcctggcggcgatagtgcggtggacccacctgagaccataccgaactcagaagtgaaacgctgtaatgccgatggtagtgtggggtttccccatgtgagagtagggcaccgccaggttagcaaatacttatctaggttaaataaaaacagaagaaccccgtgtcgaaagatatggggtttttgttttttagaagtttatactttaacaaaataagtttagataaagtttatgtttgttagtgagaaaaatacgcactagtgatacaatccacaaaattttaagaaaggtaccctatggctcgtaagaaaaaaacacgtcgaattacagatattatgccaattcgcaaagcagataaaaaaatagatataacaaaagcacgctctggtaaaaagcttactcgttatgaattggatgctaaagctcgtgaagataagaaaaaacgtaagcataaaggtttagcttcaggatctcgtcatagtgcggttgaagaaaaagcgaataaacttcaaaatgaaattaaagatccaaaaattggtagtaagaaaaagataccgttggttgttgaatttgttaataagcctgaaaaaggtcaagtaattcctgtaataaaacaggtgaaaaaacaagatccaatgaaagagcttgaaaatctggaaaataatgaaattcttaatgaattattggatgctttagatgcgggtaaaactattagtaaatcagatcaacaatttgtagatgaatgcttagatcgaatttctgagttaatggaagaacttggcattgaagacgaagatgaaagcgaagatgatttataccgcactttcgagcgtatggatattaatcaatttaggtaatctatgatttggatattttttgtcatcgcacttttcttggtaactggattgactctatatgcaatccgtttattaaagcagttaaaagttcaaaaggaattgattgctaaagctaagaataatcgggttatacgattaaaagagagcattgatattattgctcgtgcaatgcagtctggagaatgtaatccttctgaaggcgtaattcgtcttactatgctattaaggccttttggtaagaatttatcatcttatcctgcgatggctaatttatatgaagtggtgcgtgatatgcctacacatgatgaccgtaaactacttgaaaaaagagaaagaatgcgtctagatttagctcgagaaagtgcagaagcacagtttgaaaaaaatattaaacaagaattgtatattttattagaagatattaaatctattgagctaatttaaatattataattttaaagaaaaatgcgctaagtctctcctagcgcattttttatgattatttttaacgattttgttcaaaaaataataccgttgctgcaacacgagaatgaacatttaatttacgtaataaattacggatatgtacttttacggtttcttctgaaataaacagttgtgctgcaatttgtttgtttgataagccagttgcaatttgacgaagtacgcccatttcgcgatccgttaagctgtctaacggattatcttcgtgagtacgttctaataataaatttttaatagaatcactcagaatgacttcgccttgtgctatgcgcttgatttgctctagcaaagtatctggttcagtatcttttaacaaataaccatctgcaccagcatcaatcagagtataaatatcattttttgcatcagacactgttaaaattaagattcgtgcatcaacgccttctgcacgtaatcctttgagcgtatctaacccagaaagtcctttcatgttgagatctaaaatgatcacatcaggtgatgtttgtaatgccacagaaatcccttctgtgccgctgcttacgtcagccactacttcaaagttatcgtctaattctacaagttgtttaatgccacgacgcattaacggatggtcgtcaatcaataaaacttttagcttatcttgcataatttctcctttagtggttagaagtccactttaaaaagcatagcattttataaagaattcaattctatgccaatctagaatagaaaaaaatttgatttatatcacaaacttactatttgaggtaggtttattgatggataaaaatagaaaaagtgcagtagaaaaatagataattttttaccgctcttttttaagataagaaatattaaatggtcgattctaatgcccaaagttcctgtaaggtttctcgacgacgaattaaataggatttatctctatctactaaaacttctgcagtgcgggctcttgagttatagtttgatgacatacttgctccataggcaccagcagaacattgagcaatataatccccttcggcaattgaaagttcccgttgtttgcctaagaaatcagacgtttcgcaaactggtcccacaacatcataaatggctttttctctttctaaagtgcggtcaatttcgacgatgttcatgtaagcctcatacaatgctggtcggatcatatcgttcattcctgtatcggtaatggcgaaattacggctttcattactttttaagtattgtacttttgctactaaaattcctgcattggcagaaattgctctgccaggttcaagaataatttcaagttcgggataattttttagtttttctaataacgcatttgcgtaatcgcttggatgcggtggtgtttcatccgtataagtcacgcctaaaccaccgcccagatcgagatgttttaatgtaattccatcttcttttaattgttccattaggacaattaagcgatctgttgcatctaagaatggttgtaattcggtgagctgtgagcctatgtggcaatccatccctgttatttttatgtttggtagcgttgaggctaatttatatacctctcgagcttcatttacgcttacaccaaatttattttcttttaatcctgttgaaatataagggtgtgtatgtgcatcaacatctggatttacacgtaaagaaataggtgcgattttacccatttctcctgcgatttggttaatgtgcttgagttcagaaactgattccacattaaagcaacggattccaacttctaatgcacgcataatttcttctcgagatttcgcaacgccagaaaagaccacttttgacgcatcgccacctgctgccagtacacgctcaagttcgccttgcgagacaatatcgaaacctgaacctagttttgccataatatttaacacgccaatatttgagcaagatttcacggcaaaacaaattaagtgagggtgcttaccgaaagcagagtcaaaagcgtgccaatggcgttcaagtgtcgcacgagaatatacatagagaggcgtgccaaattgttcagcaagttgttgaactggcatatcttcggcataaagtttgttatgtttatattggaagaaattcatgttgtgtgcctgttttagttattttgggaatgatattagataatagattattgagtttgttgagcttgatctttttcaggaaaatataaagaaccttttacgccgcatcctgttgtcacaatgcaaattgcactaagcactaaaattgatagtagttttttcatttttctctctctcacttatcggtaaatccgcctttcacaagcttgagaaaggctttataatttgccgcattttatcagatttaaacaggaaaattttatgaatattgcagaatttcaccaaaatattgaacaagtttggcaaaaaattgaagaagaattggaaaaccaaggcgcagatgtggattgcgaaacgcaaggttcagtatttacaatcacctttgataatcgcacacaaatagtgattaacaagcaagaaccgctgcttgagctttggattgcaagtaaattaggcggtttccattttgcttttaaaaatggcgactgggtttctaatgacggacaacgtttttgggattgtttcgttgaagcctgtgctgcacatggcgagaacgtgcagttctaaaatgctggattctcctttaccatcaaaaataatagaaaaaccgaccgcactttctgttttgaaatcggttttcggttatcaatctttccgtaaagggcaggaagaagttattaatgctgctttaaatggacaagatgcgttggtggtaatggcaacggggaatggcaaatcgctttgttaccaaattcccgcactttgttttgatggtttaactttagtgatttctccgctgatttccttgatgaaagatcaagtggatcagctgcaagctaatggaattgaggcggattttcttaattctagtcagactttagaacagcagcaacaagtacaaaataagcttatttctgggcaacttaaactactttatgtgtcgccagaaaaagtgatgacgaacagtttctttcaacttatttcttatagcaaagtctgctttattgcgattgatgaagcacattgtatttctcaatgggggcatgactttcgccctgaatatacccagcttggcggtttaaaagccagtttccctgatgcgccgattatggcacttacggcaacggcagattatgcgactcaacaagatattctgcggcatcttaatctgaaaaatctgcacaaatacattggtagttttgatcgaccaaatattcgttataccttggaagaaaaatacaaaccaatggaacaactgacacgttttgtgttggctcaaaagggcaaaagtgggattatttattgcaacagcagaaataaggttgagcgaattgcggaaagtttacgcaataaaggtgtctctgctgctgcttaccacgcaggaatggaaacggcaattcgtgaacgtgtgcaacaggattttcagcgtgataatgttcaagtagtagtcgcaaccattgcttttggaatggggattaataaatccaatgtgcgctttgttgcccattttgatttaccacgtagcattgaatcttactatcaagaaacaggtcgagcaggacgtgatgatttgcctgccgaggcggttttgttttatgaaccagctgattacgcttggttacaaaaaattctcttcgaaaaaccagaaacgccacagcgtcagattgagcaacataaattagaagctattggggaatttgcggaaagccagacttgtcgccgtttagttcttctcaattattttggcgagcatcgacaaacaccatgcaataactgtgatatttgccttgatcctcctaaaaaatatgatggtttagtcgatgcgcaaaaagtaatgtctactatttatcgagtggggcaatgttttggtgcacattatgtgattgcggtgctgcgtggcatgcacaatcagaaaattgttgaacgccaacaccataaactttcagtatatggcattggaaaagataaaagtaaagagcattggcagtctgtcattcgtcagcttattcatttgggttttgtgcaacaggttattagtgaattaaatccaacgttgcaacttactgaaagtgcgaaagtgattttgaaaggcgaagaaccgttagaattggcaatgcctcgtatttctgcaatcagtaaaattgctcataatccacaacgtcaaggtgttgcaaattacgataaggatttatttgcacgcttgcgtttcttacgcaaacaaattgccgataaagaaaatattccgccgtacattgtctttaatgatgcgacgttgcaagaaatggcacaatatatgccaacaagcaatattgaaatgttgcaaattaatggcgtgggctctatcaaattagagcggtttgggcagccgtttatggcattgattcaagaacataaggcaattttggcgaatgcgcaaaataatgactaagtgttaaaagtgcggttaaaaatgaccgcactttttgttatacttgcgccaattttttcagttcttagaatttaaggttaaacaatgcgtacaagtcaatatttattttccaccctaaaagaaacgccaaatgatgctcaggttgtgagccaccaattaatgttgcgtgcaggtatgattcgcccaatggcatcaggtttatataactggctaccgacgggtattcgcgtattgaaaaaagtggaaaaagttgttcgcgaagagatgaacaaaggtggtgccattgaggtattaatgccagttgtgcaaccagcggaattatgggaagagtctggtcgttgggatcaatatggccctgaattgcttcgttttgaagaccgtggaaaccgtaactttgtacttgggccaactcacgaggaagtgattacagatttagtccgccgagaagtttcttcatacaaacaactcccacttaacttatatcaaattcaaacgaaattccgtgatgaagtgcgccctcgttttggtgtaatgcgttcgcgtgaatttattatgaaagatgcgtattctttccacacgacacaagaaagtttacaagcaacctatgatgtgatgtatcaagtgtacagtaacatttttaaccgtttaggcttagatttccgtgcggtgcaagcggatacaggttcaatcgggggttctgcttctcacgaattccaagtgttagcttcaagcggggaagatgatgttgtgttctcaacggaatcggattttgccgcgaatattgagcttgcagaagcaattgctataggcgaacgccaagctccaaccgctgaaatgtgtttagttgatacaccaaatgcgaaaaccattgcggagttagtagaacaatttaatctgccgattgaaaaaaccgtgaaaaccttgattgtgaaaggtgcagacgaaaaccaaccgcttgttgcgttgattattcgcggcgaccatgaattaaacgagatcaaagcacaaaaacacccgttagtggcagatcctcttgagtttgcggacgaaacagaaatcaaagcgaaaattggtgcgggcgtgggatcgttaggcgcggtaaatcttaatattcctgcaattattgaccgcactgtggcgttaatgtctgattttagttgtggtgcgaatattgatggaaaacattatttcaatgtaaactgggaacgtgatgtagcaatgccagaagtatttgatttacgtaacgtagtggaaggtgatccaagtccagatggtaaaggcacgcttcaaatcaagcgtggtattgaagtgggacatattttccaactgggtaaaaaatactctgaagcgatgaacgcgaccgttcaaggtgaagatggtaaacctcttgtgatgacgatgggttgctacggtattggtgtaactcgtgtggtggcttcagcgattgaacagcatcatgatgatcgcggtatcatctggccatcagacgaaatcgccccattcactgtggcgattgtgccaatgaacatgcacaaatctgaagccgtgcaaaaatacgctgaagaactttaccgcactttacaatcgcaaggcgtagatgtgatttttgatgatcgtaaagaacgcccaggtgtgatgtttgcagacatggaacttatcggtgtaccgcatatggtggtaatcggtgagaaaaacctagacaacggtgaaattgaatataagaatcgtcgtaccggtgaaaaagaaatgattagtaaagataaattgctcagtgttttaaacgaaaagttaggtaatctctaatcagtattttattttgtatattgtgacaaaagagcggttaaaaatagccgctctttttattgatctaacgtttatattgaacaatgtttaatccaaactaaatgctcgaatataaggtagttttcctttttctaacatctcttgaataccgctttgatggtcattgctgcctaacccccttaattctaaggttatgccaatgctattatcataaacaatttcattacgtgtttggttttggtggtttgtgacattgcgttttacaccaacacttgcagcccaacagcaactgttatattgaacgcctagatattgttctactggtttttgtaaggcgagatcttgataatagcgtcctactacagcccaattattggcaatttcccagcctacaactaatcccacttgttggatatcttgttgataggcgttagccgatttacctaagttttggtcaatatattcttggttcacatatcgataatttaactgaattaaattatttttttcaggattatattctagtgatgtattcgctaatgatgttgaattggtatgagtatcaaattgatagctaccacgccaataccatttattacttattttccaattagattctaatgcccaagcagatgatgaagttggtgttttattcgcagggttttcatcaatacgagaattatttaagtaataaatttgacctgcagataaattaaatcgttcttcgccagcaatatcataaaaacgcgttgtgccacccaaggtaacttgatttgccgatgaaattcgatctaaaccactataacggcgatcacggaatagcgaatagtaatcttgctgtactaatgctgaatcgtaaccaaatcccaaataatcattattaagtgttgaaccaatattgctttgatttcggtaaggacgatataaatactgcacgtgcggttcgaaggtttgtgtatactcttttaagaacgttatatcgcgtgctaatacactttgtaaatcaactttaaattgtggaataactcgatttactgttttttgcacgtcctctgcattttttcctgaaccttttttctgctcgtaacgagtcgcataaagtttcgtttcaatattcaaactgccgtatttatttgacattaaagaatttaggctaggttctgcatggaaacgccatgcagttggcatcaatttactgtcattatcaaaacgaactgcttgtgaatgtaatttgaaatttaaccatccattcgctaaatcatatttgtgatagttgaaatctaattgtggtactgcacggtaagggccgatgtttacaatatcatcaaaaatttggaactgatgtgcagaaagagaaaaattataatttggttggtaataggctatacgagcatattggttcgcataaccatcggtactgcgtccataaatagaatcaaagtcgttgaaataacgtttatcgcttactcgggtgtaattaatatttagacgccaattttgtaaaaagctagaattgtgattccaatagaacaaatgacgttttcgattatcactagcatattcagagtaacgatccttacctaaatattctcctgccactttaccttcaccaatagaggttaaatagcgaaattccccatttgcttgccaaccacggcgagacatatatttcggggtgaaagtaagatcataattaggcgcgatattccaataaattggttgtgcataccaaagaccatctcggttagatgttcccgcgcttggaatcaataaaccagaacgacgacgatctccaatgggtaattgtaagtaaggggtataaaagacgggaacaccgtgtattttaaagcgagcatgccacatttcagcatattcttctttcacgtattgacgaatttctgacgcatctacagcccaagcattgtcgccgtgcaaacatgacgtaaaggttgcattcttcattacacgataattattatgcagtgttatattatcagctttaccacgtccttgacgaccgacaaattcatattctgaatttgttaaattaccatcgtgactatctaaattaaactctgcatctttacccaacatattgatctgattatctttataatcaaatccattgcggacataagccatgcgtaaaggtgttgattggtttccagattgtttgacctgcacggattgtgctaacaaatggcgattgccttgtttcaaatctacattaccttgataggtcgcatcatttggctgattaatttctgcgttatccgcttcaatatatacaggcagaaaattcacatcacccgtcatgacttcaccgctaaattttggcacgcccattaaacattgttcatgcaaatctgccaaactttgttggctataaagtgcggtcaaaatagcaagtgaaattaaagtgtgttttttattcatcgtcttgttttaatttgtcagaaaattggtcagattatactggaaaaagcgcaaggctagtaatatttttcaagaagtgattaatagaatatccactgggttatgattaaattttttgtctattgaaccatcaatacgccaagacagcccatatcttctaacattaaattcgataccccaaataagaatgggtagttgccagaagatgcttgatcaaatttcactaaaatttgagttttgttttttacccaaacggtatctttccaagctaattcttcagcttgtaattgatgttctccttggctttccaccacaaatttggcaccttgaatagtaaatccaacaggtaaacttgcatttaaaatccagcgttcaatggtgcctttacgagccataacatcaaccttgcgtgggtcaaaacgtctttgattaattaaaccgtttgtaacatcaatattaaattctcgagtttgtgcaacggcttgttgtaacattgctggtgcatccgtttcgaaagttagattcggttgtttattaaatgctgacatttctcccttggcgcgcaattcaaggacggtgttattagcgagttcatcgcctgagaacaacatattttttattttttcgtacaagctacgtttacttccgctaatgagagatacgttgtcaatttcattcatattaaccagtatttctgcacgttctcctggcgagagaaccaaagatttgattgatttcgcttttggtaagaaacctaaatcttgtgcaataagcagcatttcttgatcattatccaagcgtaaatcataagcacgcgctaatgaggcattgagcaaacgtaaacgaatccaaccccgtgcaacatctaaatatggtgcttcaataccattcactaataagcgattgcctacaaagtgcggttgattttgtttgaataattggagaccatcattgttaaattccatatcttgtaaaatcaatggaatatcatctacgccgtatttattgggaagattcgcttttaggctttgctcatcttcaattaaccacattccagctaagccacgataggtttgataggctgagttggctaatgtcgcggaacgataccaacagcttgctgcgggttgttcaataggcacgatgggtgcccaagattcgccttttttgagaactcgagctgccccgccaaacagttcgcctgatgcttgtaaaccttgaatagataaagcaactgattgtggcaaattgttatgataattaagtttggcaaagctacctgatttgattttaatggttgggccaagataattaccgttgaatccccatactgtcacattgtgtgagccatctaacggataattcgtttcctgcatggttaatacaatcgggcgaccgcgacgaacttcaattagtggcggcacaactagtttttcacggcttgccgctaacaatggtgtgggcactgtggaaagtgcggtagaaatcgcagctgtttttaataattgacggcgggaaaggcgtggcattttagtttccttttgctatctcttcatcaagttcggcaatgcgtttttccattagatcatgacaataagccgcaagatcgcgaacattgtctttggtatagcctgaaacatcgattggatccattatttcgcaaatcactttgccattatcccaacgatttaaattaattttgttatgcgtgcttgaacacaccactggaataattggtacacctgctgaaatcgccgcatggaatgcacccgttttaaagggtaataaaccgcgaccgcgattgcgagtgccttctgggaacatccaaattgataaattatcttcattaattcgtcgtgcaagctgtgacatcgtattatgtgcttttgtgcggttttctctatccaagaaaatattacccgttacccaatataaaatgccgaagaagggtatccaaattaagctttttttacccacacttactgtgcgaggttgcaccatataagagattgtcaccatatcataattattttgatgattaccgatataaatggcgcggctaatttgcttctgatcttgaggaatacgatgttctacctttaagccaaaaagtggatataaacgcccaaaccaacgcgcaacaatgcctacgttgcttggatttttaaagcggataaaagaataaatcgtacccagtatacaaattagaatacagcagattaatacgaggaaaattcgaagtagttttaacataaggatgccctatacaaaatttcgttaaagtatagcaaattcaatctcaatatgtgctaatctaaacaaaaatcgtggaatttttatgaaacatagctattttatttctgatttgcatttaagcgaaactcagccagaattgaccgcactttttgtcgattttatgcagaatcttgccccacaggctgaacggctttacattttgggtgatctttttgatttttggattggtgatgatgagcaatctgcattgattcaacaagttaaagatttaattaagtctgtaagcgagcaaggtgtgcaatgttattttcagcacggtaaccgtgatttcttaattggtgaacgtttttcaaaagaaacgggagctcagcttttacctgattatcaattgattacactttatgataaaaaaatcttactttgtcatggcgatacgctttgtattgatgatgaggcttaccaacaatttcgccgtagagtgcatcaaaaatggctgcaacgtttgtttttgtgcttgccattaaaagtgcgggtgataattgcggagaaaattcgagcaaagagtaatcaagataaacaagcgaaatcacaggaaattatggatgtaaaccaagccttcacggcagaaaaagtacaagagtttgatgtaaatttattaattcacggacacacacaccgtgaggcgattcatcaacaagaagaatttacccgaattgtattaggggattggcgaaaaaattacgcatcaattttaaaaatggatgaaagcggggaatttggttttattaaagattagaagtgcggtaaagcaaaaactcgttattttacttaatgatactagaataatacttatccataaaatcgtacctaaaagctggtggataagcccaacttttagatacagataaaagtgcggttaattttaggattagttttctttcggtaagcgaagcaacgcgtaaattaatcctccccacaataaagtaagggctatgatcatcataataattgcgctagtagtcattttattctcctttagtttcatcaatcgttaatttggtttcgcttttccattttaagcgagaaaggaaaaatgccacgacaagtaagctaatcgacattccccaaccaaaggtatttacaaaccagtttggataaccttcataaccctcagagaagacttttgccccttcgctgaaaagcataaatgctaaaacaccactcgttaatacaatgcataaacgccagaagaaacctactttgaaagatgacgtttcgtttaagtgattacctaataaaccgagtttttcatttgctacaatcgcaattaaagacgcaaatgctacggcaacaataccgaaatagttcacaaatttatcgaacacatctaacattggtaagccagttgttgtgccgaataagatgacagaaactagcatcattggtacacccacgatgaatgtcacttttccacggctaatgcgaattttatcctgaattgcggaaataattacttcgataactgagatgaatgaagtcaatgcggcaaaggttaatgaaccaaagaataacatgcctagcacttcgccaaatggtgctttattgatgatggttgggaacgcaaaaaatgctaaaccaattccgccttttgctacttcgctgacttcttgaccttgcgctgtagcaataaaacctaatgctgcaaatacgccgatacctgctaacacttcaaagctactgttagcaaaacctacaaccaagccactacccgtcaaatcgaattcttttttaagataagaggcgtaagtcaccataatcccaaagccgattgaaagagagaagaagatttgcccataggcggcaatccacacacttggattagaaagttttgaccaatctggcgtaaataatgcatctaaaccttttgccgcacctggtaagaataaggaataaatcacaatcaccataaacatcacgacgagcactggcattaatacggaagagaccttagcaattcctttttgaacacccatagaaagcacgcctaaggcaacaatccacatcgcaattaatggtgcggttaccataccaacaaattcaaagctgataccgtttttaatatcgcccatttttaaaaattcaccgatgaagaaatcaatgggtttatcgccccacgcgccagtgaaggaaaaatatgtgtagcttgctgcccagcctaacactacagcgtaatataatccgatgatgacattcaccatcatttgccaccagccaaacacctcaaagtgagggctaaaacgacgataagaaagtggcgcaccaccacgatgacggtgcccaatggcataatctaggaataaaagaggaatccctgcggttaataatgcaataaggtaagggataataaatgcgccaccaccgttttcataagtggtgtaaggaaaacgccaaatattaccaagaccaacggcagaaccaattgctgccagaataaatgcgcgacgaccagaaaaagtctcacgcttttgtgcttttggggctgagtgagccataaattatcctatgtaaaaaatgaaaagagtttcaatataatgaaatctaatcatcagtcaataaataagccaaaagagcggtaaaaattcactaaattttttaggggaagaacaggaatattcaaaataagccaattttcaccgcactttttttcgtttttttctctccaagccctaccaatgactcgaaatttcgctacaatgctgaacttatcccaaaataaaaacaacaggacgcaaacacaatgacaggcgcacaactcattatggcgtgcttgaaagcacaccatgtcacgactcttttcggctatcctggtggcgcaattatgccaacctacgatgccctttatgacgcaggcttagatcacttactttgtcgtaatgaacaagggactgcaatggctgcgattggctatgctcgctccacgggaaaagtgggcgtctgtattgcaacatcaggccctggtgccactaatttagttattggattaggcgatgccatgatggactccattccagttgtcgccattactggtcaagttgcctcttcattaattggcacagatgctattgaaccttggcgtgagcaaatcagagatttaaaagcaaaattagatttcacttatgttgaaaatcaaggcaatcgcccgattgatccttgggcattactcaacagcctatctaatcgcaaaccaaataatgcgataatnnnnncattccattcattaattaattaatgaatgaatgnnnnncggtgcccaatgcataatctaggaataaaagaggaatcccttgcggttaataatgcaataaggtaagggataataaatgcgccaccaccgttttcataagtggtgtaaggaaaacgccaaatattaccaagaccaacggcagaaccaattgctgccagaataaatgcgcgacgaccagaaaaagtctcacgcttttgtgcttttggggctgagtgagccataaattatcctatgtaaaaaatgaaaagagtttcaatataatgaaatctaatcatcagtcaataaataagccaaaagagcggtaaaaattcactaaattttttaggggaagaacaggaatattcaaaataagccaattttcaccgcactttttttcgtttttttctctccaagccctaccaatgactcgaaatttcgctacaatgctgaacttatcccaaaataaaaacaacaggacgcaaacacaatgacaggcgcacaactcattatggcgtgcttgaaagcacaccatgtcacgactcttttcggctatcctggtggcgcaattatgccaacctacgatgccctttatgacgcaggcttagatcacttactttgtcgtaatgaacaagggactgcaatggctgcgattggctatgctcgctccacgggaaaagtgggcgtctgtattgcaacatcaggccctggtgccactaatttagttattggattaggcgatgccatgatggactccattccagttgtcgccattactggtcaagttgcctcttcattaattggcacagatgctattgaaccttggcgtgagcaaatcagagatttaaaagcaaaattagatttcacttatgttgaaaatcaaggcaatcgcccgattgatccttgggcattactcaacagcctatctaatcgcaaaccaaataatgcgataatttgtactgatgtggggcagcataaaatgtggtcagtgcaacacattttacgcgtagcacgtcactgcggatttaccgttacaacaatggaaatgacactcattgaaacccaagtgcggttaaaaatcactgtaaaatctgaccgcactttagatctattagtgaatcagttggttaagctgccggatgttttaatggttaattaatcatacaaacgaaccctaaattttactcggagagattatttatgcccaaactacgttcagcgaccagcacacaaggtcgtaatatggcaggtgcacgtgccttatggcgtgcaacaggaatgaaagaaaatgactttggtaaaccgattattgcggtggtgaactctttcacgcaattcgtaccagggcatgtgcatttaaaagatatgggacagcttgttgccgcagaaatagaaaaagcgggcggcgtagcaaaagaatttaacaccattgctgtggatgatggtatcgcaatgggtcacggtggaatgctttattctttaccaagccgtgatttaatcgctgatagcgtggaatatatggtcaatgcgcactgtgctgatgcgatggtgtgtatttccaactgtgacaaaatcaccccaggaatgttaatggcggcaatgcgtttaaatattccaactatcttcgtttcaggcggcccgatggaagcaggtaaaactaaactttctgatcaattaatccgcttagatttagtagatgcgatgattgaggcagccgatccgaatgtatcagatgaacgtattgatgccatcgaacgcagtgcgtgtccaacttgtggttcatgttctggtatgtttaccgctaactcaatgaactgcttaactgaagccttaggtttatctttacctggtaatggttctatgttagccactcacgcagaccgtaaagaattattcttaaaagcaggtcgtcaaattgtcgagctttgcaaacgctattatgaacaagatgatgcaagcgtattgcctcgttcaatcggtacttttgatgcctttgaaaatgcaatgagcctcgatatcgcaatgggtggttcaagtaacactgttttacacttattagcggcagcacaagaagcaggcgtggattttaaaatggaagatattgaccgtttatcgcgcaaagtgccttgtttaagcaaaattgcaccaaacaccaataaatatcatatggaagacgtacaccgtgcaggcggtattatgggattgttgggggaattagatcgtgctggattaattcataaaaatacacacaccgtgcttggaatgagcatgggagagcaactagaccaatacgatattattcgcaatcaagatgaagaattacataaattcttccgtgcaggccctgcaggtatccgcacaactcaagcattctcacaagattgccgttgggataccgttgataatgatcgtgtaaacggttgtattcgcaacaaagaaaatgcaatttcgcaagaaggtggcttagccgtattattcggtaatctcgctgaagacggatgtatcgttaaaaccgctggtgtagatgaatctatttggaaattcactggcacggcaatcgtatttgaaagccaagaagatgcggttgcaggcattttaggtggcaaagtcaaagaaggtcatgttgttgttatctgttacgaagggcctaaaggcggaccaggtatgcaagaaatgttatacccaaccagttacttaaaatcgatgggcttgggcaaaaaatgcgctttattaacggatggtcgcttctctggcggtacatcaggcttgtctattggacatgcttcaccagaagctgcttctggcggtgcaattggcttagtacgcgatggcgatattatcaacattgatattccaaatcgtgcaattaacttagaaatcagtaatgatgaactcgcagcacgcagagccgaacaagatcaaaaaggttggcaaccagctaaccgtgaacgtgaagtctctttcgcattgaaagtattcggccactttgcgacctcagcggacaaaggtgcggtacgcgataaaacattattaaaataatttaacggttccccctccttcataagagggggataaaacaaaggaaaaactaaccgcacttcatcatcaaaacaaacactatgaaaaacttactcaccaatcctcaaccttctcaatcagattatatcaatgccattgttaaacttggttcgcgcgtatatgaagctgcacaagtgacccctttacaaaaaatgggaaaactttctgaacgactgcacaataatatctggatcaagcgcgaagatcgccaaccagtaaatagctttaaactacgcggcgcttacgcaatgatttctagcctttcagaggaacaaaaagcagcaggcgtaatagcggcatctgcaggtaaccatgcacaaggcgtggcattatcagcgaaacaattaggcttaaaagcattaattgttatgccacaaaacaccccaagcattaaagtggatgcagtgcgtggttttggtggtgaggtgttgttgcacggtgctaatttcgatgaagccaaagcaaaagccatcgagctttcaaaagaaaaaaacatgacatttattccaccattcgatcatccattagtgatcgctggacaaggcacgttagcgatggaaatgctacaacaagtggcagatttggattatgtctttgtacaagttggcggtggtggcttagctgcaggtgtggcaattttgcttaagcaatttatgccggaaattaaaatcatcggtgtagaatcaaaggattctgcatgcttaaaagccgctctcgataaaggcgaaccaacagatttaactcacgttggattatttgccgatggcgttgccgtaaaacgcattggcgacgaaacattccgtctatgtaaggaatatcttgacgatatggtattggtcgatagtgacgaagtgtgtgcagcaatgaaagatttgtttgagaacgttcgtgctgttgcagaaccatcaggtgcattaggtttggctggtttgaaaaaatatgtaaaacaaaaccatattgaaggcaaaaatatggcggcaattttgtctggcgcgaacttgaatttccacacattacgttatgtatctgaacgttgtgaaattggtgaaaatcgagaggctttattagccgtgaccatgcctgaacaaccaggtagtttcttaaaatttgcttatgtattaggtaacagagcagtaaccgaattcagttatcgttatgcagatgataaacgcgcttgtgtgtttgttggggtaagaacgacaaatgagcaagaaaaagcagatattattgcagacctcacgaaaaatggttttgatgttgaggatatgtctgatgatgatattgcgaaaacgcatgttcgctatttaatgggtggtcgtgcagccaatgataacgaacgcttatataccttcgaattcccagagcaaaaaggtgccttattaaaattcttggaaaccttgcaaaatcgttggaatatttcattattccactatcgtgcccacggcgcggactatggaaatatccttgctgggttccaaattgaagaacgcgaacaagcagaatttgaacaggcacttgcccaactcaattatgtttttgaagatgtaacagaaagcaaatcttatcgttatttcttacgttaatcctataaaaaaggcgtgatatttttcacgcctttgtcttattcaaactctaattccaccgcactttcgccgagtaaattcaccaattccgtcagaatttcatctgttggaatgatcgaccattgcacgcctaaacgtaacaacgcacgacctttcggactttgataatacacgttaataggcaatgttccaccactcactggctcaagtaatgctttaaattgtttaatgaaacttggtgtaatttgatgctcagaaagactaatagccaaggatttgacataacgagaacgtgcctcatctaaggtcattaactcgcgcaccgtcatttttaagccaccagagaaatcatcaaagctcacttgcccagaagcaacaacaacggtatctttttgtaatttctcaccaaattgttctagactttcaccaaataatgttaaatctaagcgaccagaacgatcatctaatgtggcaatgcctaagcgattgcctttttttgtgattgcaattcgtgatgcgaccaataatcccgccacagtgctaatttgtccacggcgatttggtgcgagatctttcaaccgcgttgatgtgtaatgagaaagttctttcaaataacggctaacaggatggctacttaaataaagccccaaggtttctcgttcgccatcaagaatttgtttttcagtgtaaggtggtgtattagcataggcattttccacgtcttcatgggtttcagtcagcacaccgaacatatccgtttgtcctattgcttcatctttcgcatgctgatcggaagctctaagtgcatcttccaaattcttagaaagtgcggcacgatgtgggcctaatttatcaaaggcacccgacataattaggctttcaaaagtacggcggttaatttttttcaaatctacacgagcgcataaatcgaataaatctttgaaaatccccccttcatttcttgccgccacaagtgcttcaatcgggccttcccccacgcctttaatcgcgccaatcccatacacaatttcgccttgttcattaacactaaaatggtgttttccgatattaatatctggtggcatcacttttaagcccatacgcaaacattcgtcgtacaaacctacgattttatccgtattatctatttcagatgtcatcactgcagccataaattctgcagggaaatgggttttgagccaaagagtttggtaagacaccaaggcataagcagcagagtgagatttattaaaaccatagccagcaaatttttccaccaagtcgaaaatcttcatagatagctcgccatcaacaccgtttttctcagccccctctttaaacactaaacgctgttttgccatttcttctggtttctttttacccattgctcgacgcaataagtcagccccacccagcgtatagccagccaacacctgcgcaatttgcatcacttgttcttgatacaaaataatgccgtaagtcggctcaagaataggtttcaaacttgcatgttgatattctgcgtcagggtaagatacttcttctctcccgtgtttacggtcgataaagttatctaccatacccgattgtaacggccccggacggaacaatgctaccaatgcgataatatcttcaaaacagtcaggttgcaggcgtttgatcaaatctttcatacctcgtgattccaactggaacacagcggtggtttcggaacgtttaagtaattcaaaagattcaggatcatcaagtggaatggcggcaatatctactcgaggcttgccttcacgcaccatacgaacattaatcatatccaatgcccatttaatgatagtgagagtacgcaagcctaggaagtcaaatttcacaagccctgcatattccacatcatttttatcaaagtgagtaaccggatgtaagccttcattatcacaatagagcggtgcaaaatcagtaattaaggttggcgaaatgaccacgccacctgcatgtttacctgcattacgtgtcacaccttccagcttgcgcgccatgttaatcaatgctcgcacttcttcatcgctatcgtaggcagtctgtaattgcggctcggcctcaaacgctttggcaagcgtcatacctggatcgggaggaatcaatttcgaaatacgatcaacgaaaccataaggatgccccagcactcgccctacatctcgaataaccgctttcgccgccatcgtaccaaaggtaataatttgtgataccgcgccacgaccataggtttcagcaacgtgttcaatcacgcgatcgcgaccatccatacagaaatccacgtcgaaatcgggcatagacacacgttctggatttaagaaacgttcaaatagtaaatcaaactctaacggatctaaatcagtgatttttaatgcataagccactaatgaacccgcaccagaaccacgacctggccctactggaatatcgttatccttagaccattgaataaattccattacgatcaagaaataacctgggaaccccatttggttaattacatctagctcaacttgcaagcgttcatcatattttggtcgtttttctaaccgcactttttcatcagggaataaaaaaactaaacgttcttccaagccctctttggatttttgcactaagaaatcttctgtacttaaatcgccagttggaaattgaggtaagaaatattgaccaaggcgcaaagttacactacaacgttgcgcaattaataaggtattttcgagagcggaaggaatgtctgcaaacagcttacacatatcttcttcactacgaaaatattgctgtgaggtataacatttcggacgtttaggatcgtctaaagtatagccatcgtgaatcgctacgcgaatttcgtgggcttcaaaatcctctgcattcaaaaacatcacatcattagttgcgaccaatggtaaatcacaacgttctgctaatttcaacgctgcttgaatgtaacgttcttcatttgggcgacctgtacgacttaatgctaaataaaaatgatcggcaaaaaattcttggtaaaaagcgaccgcactttcaatttcggctacgttttctttcaacaattttttacctacatcgccttgcgttccccctgataaaataatcacaccgtcgcgatgttcaattaaccaatcttgatcaatataaggtaaatcgttataaccgcgttgataagcctttgataacaataaagtaatatttctatagccttcattatttttagctagcaaagtaagatcaaagtattcatcgccacataatgggctttttacttttacatctgccccgataatgggcttcatacccgaagaaagcatttcgctataaaaactaaccacaccacaaaaattagtaaaatccgttaatcccatagcaaccatttcattggcagcacaagctttcacaagaggtttcactttgacgatactgtcaatcatcgaaaaatctgtgtgtgtgcgaagatggacgaagcgaggttgggatgacattgaaaatccttaaagtgcggttaaattttgccgtaaatattaaagcggtattatagcgaatttttcaaacaaatgcttatgctacaaatagtgttcccaaattggctcggataaccgattgcgtgaataaaaaatgttaagtagatcaaaaaattgagaattagccgttttcattttgttagatttccgctagtctaacggcgattttttatttatttcaacgaataaggataacgctatgacaacactttttgaggttgcacaacattggttaaaccaagatcctgacacagaaactcgtgcagaattaaccgcacttttagatgcagcaaaaggcggagataaagcggcagaagcagaattacatgcgcgttttgatggtcgtttacaatttggtacggcaggtttacgtggtcgtttacaagctggctcaatagggatgaaccgagttttagtttctcaagctgctggtggtttagcggaatatttaaaaggttacgataaagaaccctcaatcgtcattggttacgatggccgtaaaaactctgacgtttttgcccgtgacaccgctgaaattatggcgggtgcaggcgtaaaagcttatttattaccacgcaaattaccgactccagttttagcctatgctatccaatattttgataccactgcaggtgtaatggtaacagcaagccataacccaccagaagataatggctacaaagtgtatttaggtaaagcaaatggtggcggtcaaatcgtttcaccggcagataaagacatcgcagcattaattgataaagttgcggctggcaatatccaagatttaccacgtagcgataattatgtggtgttaaatgatgaagtggtagatgcgtacattacaaaaactgcatcattagctaaagaacccgcttgcgacattaactatgtttataccgctatgcatggtgtgggctatgaagttttaagtaaaacactggcaaaagcaggcttaccacaaccccacgtagtagcagatcaagtttggccagatggcacattcccaacggtgaacttcccaaatccagaagaaaaaggcgcattggatttagcaattaaagtggcaaaagaaaagaatgctgaatttatcattgctaatgacccagatgcagaccgtttagccgttgctgtgcctgatgcgcaaggtaactggaaatcactacacggtaacgtggttggctgtttcttaggttggtacttagcaaaacaatatcaaggtaaacaaggcacattggcttgctcacttgtttcttctcctgcactcgctgaaattgcgaaaaaatacggtttccaatcagaagaaaccttaactggtttcaaatacatcggtaaagtatctggcttattgttcggttttgaagaggcattgggctatctagtggacccagacaaagtacgcgataaagacggtatttctgcagcaatcgtgttcttagatcttgtgcgtaacttgaaaaaacaaggcaaaactttagcagattatgctgatgaatttaccaaagaatttggtgcttatgtgagtggacaaatctctattcgagtcagcgatctttcagaaatcggaaaattaatgaccgcacttcgtaacaatccaccagcagaaatcgctggcgtgaaagtggcacaatttatcgaccatactaaaacggatcgtcaaagcgatatccttgtatttaacttggaaaatggcggacgcttaattgctcgtccttcaggtactgaaccaaaaattaaattctacttggatgcgcgcggtaaagatccaaaagatgcagatcgcgtattggcagaatttgatgaaggtgtttgtcacattcttcgccaagatgcttatggcaaacaagactgctaattgcacaatgggatatggatacgtcaaacggtgcattgacttgttgtttgaaaagggtgtggtatttggtcataaaaaatctgcaccttagttagttggttatttaatccagcttttggggtgcagatcatttctagcttgccttttgttttaccatttaattaatgtttagtttgttcttcctcagatttttcttctgcattttctgcttgttggcgattcatatattcaacaaacaatgcatcaaagtttactggagataagtttaatgcagggaacgtaccgcgatttactaggttagacactaattcacgcgcataagggaaaagcatattcgggcattgagaagttaaacaatgcgccatttgaacatcttctaaaccgctaatagtaaatacgcccgcttgttttacttcgcaaataaatgcgacatcgccactatcttcaagtgtagtttcaacagaaatgtttaataccacttcatataagtcatcgccaacttgggttgtttcggtgcttaaatcaaaaccaagttttggtttccattcttgttggaaaatatgtggaagatttggagcttcaaaagacacatctttcacataaatacgttgaatttggagaacgggttgttgttcttctgttgctgcaacgtcttgtttttgttctgacattttctattccttattatttatgttttttaactaaaggtaaatttgctgctacccacgcggaaaggccttctttcaacacaaatacagaattaaaaccttgtttggttaaaaatactgcagaagcagaggctgaagtaccatttgtatcgactaatataagagctttctctttatacgactctaattttccgatattttgatttttaatttcgcttggaagcacattaatactattaatgatatgtccacgttgaaattcttcaagactacgtaaatctaccacaatggcttcatcggaatttattaaccgaataacttcattgtgcgtaattactttaaatttattcgttgcgcctttgtagaaggtataaatcaccatcacgaaaatcgcaaaccaagaaaccgctaaaagcgtatgtttttgagcaaactctgttgccattgagataaattcttgcattgttttctctactgattaagtacgtcaaaatagggctcaagtataaccgcacttgaagcatctttcaaaaaaattatgcttaaattccgtacttgcataaaggttatacaatcaacaaaaaattatgtgatcgagatcataaatttgtttttccattgtttataaataacttaatttagttagattactttggagaaatttttattcatcttaggagaaatctatgaaattaactaaattagccttatgtactttatttggtctaggtgtttcaatagcaaatgcagctgacttaccaaatattacaatcttggcaacgggtggtaccattgcaggaagcgggcaaagttcggtaaattctgcgtataaagctggacaattaagtattgatactttaattgaagctgtaccagaaatgaaaaannnnncattccattcattaattaattaatgaatgaatgnnnnnaaaataggttcacaagacatgaatgacgaagtctggctaaaactggcaaaagccatcaatgctcaatgtaaaagtactgatggatttgtcattacccatggtacagataccatggaagagacggcttatttcttagatttaaccgtaaaatgtgaaaaacctgttgttctcgttggggcaatgcgtcctgcaacagaaaaaagtgctgatggcccattaaatctttacaatgctgtcgttgtcgcagcagacaaaaaatcaagtggtcgtggtgttttagtcgcaatgaataatgaagtactaggtgctcgcgatgtaacaaaaaccagtactaccgcagtgcaaacgttccattcaccaaattatggttctctaggctatattcataacagcaaagtggactatgaacgttccccagaaagcaaacataccatcaacactccgtttaacgtagaaaaattagatagcctacccaaagtggggattatttatgcttattcaaatgcacctgtcgaaccattaaacgcattactcaatgctggctatcaagggattgtatctgcaggagttggcaatggaaatgttaatgccgcacacttagatcgcttagaaaaagccgcaaaagatggcgtcgttgtagtccgttcttctcgtgtaccaacgggttatacaactcgtgacgctgaagttgatgatagtaaatatggctttgtagcatcaggtactttaaatccacagaaagcccgcgtgctcttgcaattagctttaactcaaactaaagatccaaaagtaattcaacaatatttcgaagacttctaagatcaattgtaataaacaaaagtgcggttataaataaccgcacttttgaccacaatttattgatccaagttatggaatctctacctatttgttgctatattacacgccgtttcaacaaataaaataaagtgtttttttattaacttaggggggcagtatgtctgcaatgtttttactacaatttgccatcgtattattgtgtatctttgtgggtgcgcgtgtaggtggtatcggtttaggtgtatttggtggtttaggtcttgccattctttcttttggctttggcttgaaaccagcaggtttacctattgatgttatgtttatgattatggctgtagtggcagccgcggcagcaatgcaagcagctggcggtttagactacatgatcaaaatcgcaaccaaaatcttacgtcgtaatcctaaacacattacgtttattgcgccagcagtaacttggttattcactctcttagcgggtactggtcacgtggcatattctgtattgccagttatcgctgaagtgagccgtcaaaacggtatccgtcctgaacgcccaatgtcaatggcggtaattgcatcacaatttgctatcgtagcaagcccaatcgctgcagcggtggtggctgtggttgcttaccttgagccacaaggcattcatcttggcgatgttttaatggtaaccattccttcaactattctaggacttttccttgcttgcttatttgttaataaaatgggtaaagaattaaaagatgatccagaatatcaacgtcgtttgaatgatccaaaatatgcagatatttttgcttctaccacttcagtcaaagaagtagaagtgagcaaaacagctaaaatttccgtttctttattcttatttggtgctttacttgtcgtgttaatgggtgcagctccttctattcgacctgtttttgatggaaaaccaatgggaatggcacataccattgaaattattatgctttctattggtgcattgattatcttaacttgtaaaccagatggcacagcgattaccaaaggttctgtattccatgcaggtatgcgcgcagtaatcgcaatcttcggtattgcttggttaggtgacactttaatgcaggcacacattactgaagtaaaagaaatggtgaaaggcttagtggaaactgcaccatgggcatttgctttcgcgctatttgtactttctgtattagtaaacagccaaggtgcaacagtagcgacattgttccctcttggtatcgcattaggtatccccgcacctgtattaatcggtgtatttgttgctgtaaatggttacttcttcatccctaactatggtccaatcattgcatctcttgacttcgataccacaggtacaaccaaaatcggtaaatacattttaaaccacagctttatgcttccgggtttattgagcatgtttttctgcttattaatcggtttaggtctttcgcacgttattctttaaaatgtgattcgataacaaagaacggtgctgaaatagcaccgtttttgttgttctaatatcaacttaaaataactcaaaaaaataaccgcactttgatatataagtgcggttatttttatgaaagttttccgccctgtttcgttgttatgttatcattacattaatgtaacatttttaacaatttaaacttttaggagagctttatgaaaaacgtcgtgatcgttggtgggggtgctggcggtattgaattagcaacatttttgggtaataaattaggtcgtcaaaaacaagctaaagtaacgctggttgatcgcaatgccacccatttatggaaacccttattgcatgaaattgcaacaggtgtaatggatgatggcgttgattctttaagttatcgtgcgcacggtaaaaatcattttttcagttttgagcaaggttcaattatacgtattaatcgcgagcaaaaatatgttgaacttgcacctgtttatggacaagagggcgatatgcttgtcattgctcgtcgaattccttacgattatttagtgattgccattggcagtaaatctaatgatttcaacacaaaaggggtggctgataattgtatttttttagatagttcaaaacaggctttacgttttcaacataaactgttggaattatttttaaaattttcagaaaaccgcgcattagatgacattggcgaagaagaatttaaacaaaagttagtggatgaaaataaagtaaatattgctattgtgggaggtggagcaactggtgtggaattaaccgcagaactttatcatgccgctgaagatttgtcttcttacggttatggtaaaattgatagttcttgcttacaagttactttagtcgaagcaggaacacgtttattgccagcattacctgaaaatttatctgctgctgtgttagatgaattaaaggaaatgggtgccaatgtgcaattaaacacaatgattactgaggcacaaccaaatacacttattaccaaagatggcggggagattaaagctgatcttattgtttgggcagcaggggttcgcgtctcaacagtaacgcagcaatttgatggattagaaattaatcgtatcaatcaattagtggttaaagatacacttcaaactaccgttgatgatagtatttttgcgattggcgattgtgctgcatttatacaatcaaatggtaaattggttccgccaagagcgcaagctgcacatcaaatggcaaaggcttgtgcaaaaaatatttttgcattgtttgaaaataaaccactgaaatcttttaaatataacgataaaggtactttagtttctctgtcaaattttaccgcacttggtagtctaaccaataagtttggtaaaaatccacttaccgttcaaggtaaatttgcgcagtttgcttatgtatctttgtatcgaatgcaccaacatgctttgcacggttgtattaaaattggtttgattattctcgttgataaattgaatcgttatttaaaaccaagattaaaattgcattgattaaaagtataatttttcgttaaatgcgatctaaatcatttatataaaagaaagggcatcaatgatgccctcagtattgttttatgaagaaagatcttcggatttttcaattgttcctttcaccgttaagcaaatttctgttgaaatcaaatgggaaagcgttgaagctaattcttctattttatcaagaacagtataaccagattcatcaaagtaacgttgctctttcaagtttgcaataaagcttgaaaaaaccgctttatcaaagaattctggtgcatttatgccgtgtaatactgataaacgttgagcaacaagctggctttctttttcaagttcagctcgagaaatagcaggttgtttttgtaaaatagtgacagtaatgtaataacgttgcaagatttcccgcgttcccgcagaccaaagctgtaaaattcgtacttttgatttattaatagataagaagttatcatttgaattaataacgatttggcgtgcaaattcattaatgatttgatggatttgtacattcaattcatcttcattgaaatgtaagaacaattcgccttgtaagaaagggtaaatttttctaatcgcgtctaataataaatctttttggatcgcttcgtaatgcaaaataatactcgcaactaaagatggtaatacgaatagatgctgaatattattacgataataagtcattagtacagcagatgaacgttctaagcgtacaatttcgccaaaattatctttttcaattaacacacctatacgatctaaagctaatacgtgttctaacattgcttgcggtgtcacatttggtagcactacgtccgtagaataagggacattttgtaacaattgttgataactactaagttgttctaacagttgctcacgtgaaagtgctcgctgacgagatgaaagtagtgctgtacccacaaggttcattgaattaactgccgctgctttgttaatattaatcattacttgtttagaaatattatttaccgcaggtgtaaaccattgtggtttttcttcgtgattttgctctttccaatcagggaaatgttggctcaaatagtttgaaagcgtaattggctcaccaaaatttacaaaaccttgaccaagattacgtaattttttaattacacgaagtactaaacccgcattttctttttctttcgctgcaccacgtaattcctttgcataagtgtctacttctaatacgtgttcataaccaacgtaaacaggaacaatcgaaattgggcgagtttgactatgttgtaatgcttgaagtgtcattgacatcatacctgtttttggtgccagcaaacgacctgtacgagaacgaccgccctcaataaaatattcgacggaatagcctcgatggaatagttctgataaatattcgcgaaaaatggcagaatatagtcgatttcccttaaaagtacggcgaataaagaatgccccccaactacgaaacattctacctataggccagaaatttaagttaatccctgccgcgatatgtggcggaacaagaccttgatgataaagcacataagaaagcaataagtaatcgatatgactacggtggcaaggcacataaacaatttcatgaccttctaacgctaatttacggacacgattcgaattttgtacatcaatacctgaataaagtttattccaaagccaacgtaaaaaacgatctactgcacgtaaacttgaatggctgacatcagctgcaatttcatccaaaattttatatgcttctttttgtgctttttcaatactgatattttttgattttgcttcatcttcaattgctcgtcggattgcttctgattgcaataatttattaaacattgcttgacgatttggtaaacgagggcctgtcgctgaaatacgttgttttgcgaagtgcatttttgcaactcgagccagcttttgtgcaattttttcatctgagccatgttcaactaccatataacgtaatgaaaccgcttgagaaaaacgcacaaaagtatcacgtccaaaccaaattgctgcaaatgttttttgtataccatttaataaacgcaaattaggcaaatctgatttatcttcttgtccgggagaacgtccccaaagaacagaaacaggaataagttgcacatctaaactttcagaagtgcggtgtaattcaagatatttattgaaaatggtagtggtttcgtcttttgcaccttttgatttaaaaattcggcgaccttcgtctaaatatacataacgtggtaacttaacgccattaatttcatttttctctgcgggatcgggcaagcctaacgctaagcaatttcggcggaaaataacgaaatcagtttgagatgtataaggcaaaacataaacaataggttgatgaatattaagtgaaagctcttctattggattggcgggaataggattatttttcaccaatgcagacagcggcaagctcaataattggcgatacatatttataaaatttgccataataaattttctctttgttataagtttgtagatcttatagacgtttaaaagcagtttgtgaatagaactatttttagccctttggtgtttttatcgtctaaaaactcgaatattttaacacatccgatctcaactaatttagaaaatttggcgacaaaatgtgacttaatacacagatttaaaaaataacagttgcaactttacacaatctgtatacaatgccagttatctgtatttaaaaacaggagtgtatatgagaccattaaccgcacgccaacaagaagtgttggatttattaaaacgccatttggaaacaacaggtatgccaccaacacgagcagaaatatctcgagaattaggtttcaaatctgcaaatgccgcagaagaacatttgaaagcactttcacgtaaaggtgcaatcgaaatcattcccggcgcatctcgtggtattcgtattttagacaatagttcgaatgatgaatttgacggtttaccgcttgtagggcgcgtggctgctggagaaccgattcttgcagagcagcatattgaagcgacatatcgagtagatgcagatatgtttaaaccacaggctgatttcttacttaaagtttatggtctatcaatgaaaaatgttggtatcttagatggtgatttattagctgtgcatagtactaaggatgtacgtaacggacaaattgtggttgcacgtattgaagatgaagtaacagtaaaacgtcttgagaaaaaaggttctatcatttatctacacgcagaaaatgaagaatttgatcctatagtagtcaatcttgaagaacaaaaaaattttgaaattgaaggtattgcagtaggcattattcgtaataacgcttggatgtaatctgataccaagaatgaataaagtgcggtaaaaatttacggtatttttaccgcactttgcttatactagagttctttatttgccatgatttttgctgctctttataatgcaaaaatcttgaatttatacaaaggatggaaaaatgcagttttccaaaatgcacggattaggtaacgattttgttgtggttgatggagtcactcaaaatgtgttttttactccagaaacgatccgacgtttagccaatcgccattgtggaattgggtttgatcaacttttaattgttgaagctccttacgatcccgaactcgactttcattatagaatttttaatgctgatggaagcgaagtttcgcaatgcggaaatggtgctcgttgttttgctcggtttgtgacattaaaagggctaactaacaaaaacgacatctcggttagcacacaaaagggtaatatggttttgacggtaaaagatgacaatcaaattcgtgtgaatatgggcgaaccaatttgggaaccagcaaaaattccatttaccgcaaataaatttgagaaaaattatattctgcgtacagatattcaaaccgtactatgtggtgcagtttcaatggggaatcctcattgtgttgtacaagtagatgatattcaaacagcaaatgttgaacagcttggtcctttgttagaaagccacgaacgttttcctgagcgtgtcaatgctggttttatgcaaatcatcaacaaagaacatattaagcttagagtttatgaacgtggtgctggcgaaactcaagcctgtggaagtggtgcttgtgcagctgttgcagttggaattatgcaaggcttattaaacaacaatgtccaagtagatttactgggcggttcgctcatgatcgaatggaatggtgttggtcatccactttatatgacaggcgaggcgacccatatttatgatgggtttataactctttaatattttttccccatttatcttaaaaaagattgggcgtttttcttaaattagcgtaaacattttgtatctaaatatatttttattgaactgtttgataactttaagtaatcagaataagcatttttcatacaatctctagattttttactcaaagaaatagattattagcataataaaaaaccgcctctcggcggttcttgttttaaatcttttatctactacgctaacactgccaatgcagcttcatagtttggctcttctttaatttcttcaactaactggctgtgtaaaacattgttttgttcatctaacacaataaccgcacgagaagttaaacctgccaacgggccagtttgaatatctacgcctaattgtgagtgtaatgcatggttacgaaaagttgaaactgttttggcattttcaatcccttctgctccacaaaaacgagcttgagcaaagggcaagtctgctgaaatacaaagcacaacagtattacttaattttgccgcttgttggttaaatttatgtactgaagtcgcacatacacctgtgtcgatgcttggaaaaatatttaggaccttgcgtttacctgcaaaatcgtttaatgcaacatcggctaaatcattaccgactaaaataaagttttctactatttcgcctacttgagggaaatgtccgccaacttcaatagggtttcctgctaatgtaactgtcataaaatcctctttatttagattaagtgaaaagtgtttaaactataccacgctttctaattctttccaccaattaaagctatccagaatttgattttcgggaaaatttcagccaccacacaataaccaatagcaaagactaatgaaaacagtatgtgcgttaccccgatccagttaaatccgtgaaatcaatagggctctgcgcggtggaaaaggatgctccgctccccatttaacgaaagcagagataaaacctgcaaaaaattgcaacgccataacgacgtttagatggttctgaaaataagctcattgttatgtccttaaattaattaaaagtataaaaatttccgagtttatgaaagtgtgtaattttacgtctgttatatcacattatcaaacaaaaatacttcaattgggttatctttagctggctgttcataaggttttaaaatttattagcaatagataaagtaattgattgattttttagcggttgtagagagggtataagctttgtattacttgaaaatagggagtatgtttgaacataaatcttcttgttttattttgaatgcaaacgtttgctttgttcgttataatacgtctgttttttattttcttttatacggaactgcaatatgactgtcaaaacctttcgtggctcgcctgctctttctgaatttcgtttaactcaacttcaacaaaaatgccagcaatatcaattgcctattaggtcagtttatgcagagtatttgcattttgttgaacaaaaaacatcgcttgtagaagatgaaatcgttaaattacaagcattattgcattatggatcaatgttttctgaactcaagcctgcaggatattgtttaattgtgactccacgagtggggacaatttcctcttggtcttcaaaagcgacagacatcgctcacaattgtggtttgtcgaaggtaaatcgtattgaacgcggtatagcctattacttcaatattgagcgtgatttaaccgaagcagaattggctacgctgaaagatttattacacgaccgtatgttagaaaccgtgttaaatcacgaaacagaagtagccttgctttttactcaacaagaacccaaagcattaactaccattgatattttaaatggtggccgtcaagcattagaacaggcgaatattgccttgggtttagcgttggcagatgatgagatggattatttagtggaaagttttactgccttaaagcgtaatccacaggatgtggagctttatatgtttgcacaagcgaattcagagcattgtcgccataaaatttttaatgccgattggattattgatggcaaaaaacaggataaatcgctgtttaaaatgatcaaaaatacctttgagcaaacgcctgattttgtgctttctgcttataaagataatgctgcagtaatggaaggttcgaaagtcgggcgttggtttcctgatcctgatggacaatatcgtgttcatcaagaagatgcgcacattttaatgaaagtggaaacgcataaccatcccacagcaatttcgccatttcctggtgctgcaacaggctctggcggggagattcgtgatgaaggggcaacggggcgtggggcaaaacccaaagcaggtttaacaggtttctcggtgtctaacctcgttattccaaactttgaacaaccttgggaaaatccattgtctaaaccaaatcgcattgcttctgccttagatattatgatagatgcgcctttaggtagtgcggcatttaataatgaatttggtcgcccagcattattaggttatttccgtacttatgaagaaaaagtaaatagttttgcaggaaaagaagtacgtggttatcacaagccgattatgttagcgggaggaatcggtaatattcgtggcgaacaggttcaaaaaggcgaaattccaatcggtgctaaattgatcgttttgggtggggcagcaatgaacatcggtttaggtggtggtgcagcttcttcgatggacagtggtaaatcaaaagaagatttagattttgcttctgttcaacgtgaaaatccagaaatggaacgccgctgccaagaagttattgaccgctgttggcaattaggcgaagaaaatccaatcttgtttattcacgatgtgggtgcgggtggtttatctaatgcaatgcctgaattggtacacgatggcaagcgtggaggaaaattcgatctgcgttctattctttgtgatgaaaaaggtatgtcgccattggaaatttggtgtaatgaatcgcaagaacgttatgtattagccgttgcgccagaaaacctcgaattatttaccgcactttgtaagcgtgaacgtaccccttttgcagtgattggcgaagcaacacaagcagaacatttaatcttgcacgatagtcatttcgataataatccaattgatttaccaatgaatgtgttattaggtaaaacgccgaaaatgacgcgtgaagttttgtcaaaaacagtagaaaatcaatcacttaaaacagaaggtattcaattaaaagaagcattccatcgtgtattacgtttacccgttgttgcagaaaaaactttcttaattactattggtgatcgctcggtaacaggaatggtagcccgagatcaaatggtggggccttggcaaatccccgtgtctgatgtggctgttactactgcttcactggatagctaccacggcgaagcaatggcaatgggcgaacgttctccagttgccttgctagatttctcggcttcggcacgtttagctgtggcggaggccattactaacattgctggcaccctaattggcgagatgaaacgtattaaactttccgccaactggatgagtgcagcaggtcacacaggcgaagatgcgggactttatgaagcagtaaaagctgtgggcgaagaactttgtcctgcgttaggcttaactattcctgtgggtaaagactcaatgtcgatgaaaaccacttggatcgataatggcgaacaaaaatcagtgactgccccactttcattagtaatttccgcttttgctcgtgtagaagatgtacgtaaaacgcttacgccacaacttcgtaccgacaaaggtctctcgagtttattgctaattgatttaggcgaagggcataatcgattaggtgcgaccgcacttgctcaagtgtacaaacagttaggagacaagcctgccgatgtggtaaaggttcaacgcttaaaagatttttacaatgcaatgcaaactttagtggcagaagataaattattggcttatcacgaccgttcggacggcggtttaatcacaactcttgcagaaatggcgtttgcagggcattgtggggtagaagttgatatttcagctttaggcgacaacgatttagcggtattatttaacgaagaattgggagcggttatccaagttgccgatagccaattagaaagcgtacgtgaggtgttgaaagctcacaatttgcttggtattactcaccaacttggtacggtaactgttgatgatcgctttgagatcagccgcggcagccataaattattcagcgaaaaacgctctgaattacgtagtatttgggcagaattaacttaccaaatgcaacgcttacgcgataatccagagtgtgctgagcaagagtttgaagctaagaaaaaccctgacgacaaaggcttatccgcatttttgacttacgatgtgaatgaagatattactgcgccatttatcaataaaggtgtaaaaccaaccattgcaattttacgtgaacaaggtgtaaatagtcattatgaaatggcagcagcgtttgatcgagcaggctttaatgcaattgacgtgcatatgtctgatttaatgattggtcgtcgtaatttagccgaattcaatgcaatggttgcttgtggcggtttctcttacggcgatgtgcttggtgcagggggcggttgggcaaaatccatcttatttaacccgaaattacacgagcaattcagccagttttttatcaatccaaatacactgaccttaggcgtatgtaacggttgtcaaatgatctctaacttggcggaaattatcccaggtacagaaaactggccgcattttgtacgcaacaaatctgaacgctttgaagcgcgtgtgagtttagtgaaaattaatgaagtggattcagtttggtttgcaggaatggcaggctcacatatgcccattgcggtttctcacggggaaggacaagttaagtttaaatcagttgaacagtttgcaggcttaaaagcacaaggcatcattgccgcacaatatattgacaacaacggtagccccaccgaactatatcctgccaatccgaatggttcttcggagggcattactgcaattacaaatcttgatgggcgagttgctattatgatgccacaccctgaacgtgtgttccgtgctgtgagtaactcttggcacccagaaaactggacagaagacggtgcgtggatgagattattcagaaatgcaagaatggtattttagagaaataaatggacttgaacgctaaaaaagtgcggtggaaatctagcagattttcactgtgtgcgttacttttaaaacggaatttacgtatttgtaaaatgaataggtaggggtataattatctaccataactaaacaaatcacatcgtttacgatttgtctttttataaataaatattttatgaaggcggaattatgttaatcacattaacacatattaataataacttgataataagaaatgaaattttagatagtcttggcaagcaagcaagcaagcaagcaagcaagcaagcaagcaagcaagcaagcaagcaagcaagcaagcaagcaagcaagcaagcaaagagtgacttaaatagtacatcacaaagcaaacaaattattcttcaagaaataaataaggtaaaagaaaagagaacaatattagaaaaaataataagattgtttactaaacataaaagaattactgctaaacaaaataagcagaaatttatcgttccatttaaataactatggagagattatgtttattacacctatcttcattattaatctagaaaaatctacagatcgaaaagcttatatgcaagcacagtttgaactgttattttcgaataatttaatacaagaaattcacttttttgatgctatttatggaaaatcaaatccgaatcacccattgtttcaacgttacaatgaaaataagcggttgaatgcaaaggggtatcctttaaccttgggtcaattaggctgttatgctagccattattctatgtgggagaaatgtgtagaattagattaccctattattgtattagaagatgatgctaaatttaaaaataatttcttagaagtacttgattttattaatagcgataaaaatacgtttgaatttttctggttacaacctgatcgtttgaaaaataaaagaaaattgatctctaatttcggtaatctttcgatatatcaatttagtaaaggatttgctggtgctacaggttattatttaactccccaagcagcaaggaaatttttaacacaaagcaaggagtggtatttaaccgtggatgtgacaatggatcgtttttttgagaataaagtgccaccttatgcaatagtaccattttgcttagaagatgatggcgagatagaatcaactatttatgagaaacaaaagaaacagagatcattaaaaatagtgattatgagagagttgtttaatctaaaaactaatattaaaagacgtatttataacttattccattgataaattgatatagtagacaaagcagttgttaatgtttatttttaaatattagcaactgttttattttggaattccacgtagtaatcctacaggctcaaaaggttctatagaagttggcgcaggcacttcgctgaataataaaataaatggcttgggcggaataactttttgatttcgccataagttgcccattccgactaattgaatatcttcgggtaaattacgaagacctgcttgtaaaacagcaatcgtatttggacgaggatgacctattgcaatggcggagccgtgttttctagcatagtgaattgctgctttaaattgacgttgaacgtctgcgaattcgttactatcatctaaaaatatatggcgatctaatgaacgcacgccttgctcttttgctatttttccagctacagattttcctattgttcgactatctaaaaagaataaatgtttttcttgaagagcggtcattaaataagtcattaattggggatctgccgttgctgcactccccatatgattgttcataccgatggcatcacgcacaatatttttagcagtattaacgcgatcatttacttgtgctgcagacattcctaaatgcagccctccgtcttctattttcactgcacttactggttgcatcggcatatggattaaaatatctctaccttgagattttgcttcttgattacgtgctcgagcatagggcgcagcaggaataattgctacggaaatttcacgtggcatcgcaaaaattgctgcatcttctttgagatgatagcctacatcatcaatcacaatagcaagtttactttgagcaaaagaaaaagaggtataaagtgcggtagaaaaaacaatgaaattttttaccgcactttttatcagaatattcatcaacgaacccaccctgcaggatttactggcgttcctttacggctaataccaaaataaagcgcagaacgtgatatttcccctgtatttcctacttgagcaataacctgccctgctgaaacaagctgaccaactttcactgataccgtttgattgaagccatataaacttaaatcagtttcgccgtgtttaacaataaccatataaccataaccatttaaatatcccgctaaaatgacgcgtccagcagcaattgctttaacaggtgtgcctgctgatgcgccaattaccatacctttccaacgtacttcgcctgcttggatagaaccaaaagtatgcaaaattgaaccagaaactggtaaggaatattgtttttttgccgcccctaaaccgcttgtactattaagtaattggcgttcttgcacagttggttgataaggttttgatgttcgtttttcttcagctttttggcgttgagcaagtgcctctctttcacgtttttcttgttcgtgcgctgcttgttcagctcgttgaatttcttgacgaagtgcttgttcgtttgcttttagtgcattcaatttatcttgatctagggctaaatttttattgagttcattcagtgtagattgatgctcttgctgtgctttttgcaatgcttgttgttgttttttttgtgtggaaagttgatttcggtgattcttttgttgagagagaaccgcctttttttgtactgcaatttgtgcttgcgttgcttttaaattattaatcatttcaatccgaacttgatttaaatgctgataataaactttcattcgctctgcttttgtcggatcttgggcaaacattcgttcaatcagcgatggattaatgcctgaacgataaattatatctatttgtttggctaatcgtgctttttgctcacgttcctgtttttctaattgtttgagttgcttatctgcatcggcaatttgcttacgaatttcctttaaacttatttcggtttcaagcagttcgccctcaacactgttaattttactctcgtgtttttttaaatttgcttgtaacttagcttgctcacgtttttgcttctctattttagattcttgttgcttaatttgtttttgaatttgattgagatcggaagattggctgacaggcgaaaatattaataaaccgcagcttaaaagtgcggttaataataatgatgatgttttttgattaacgccaaaacgcaacataattcatcctaaattcgtaaaactcgcaaatcttatcatatttgttaaaaggcgaaaaagtttgatggttattttttgctaaagatcaggaaatcatcccttttaacttttaaagctaaggattttttgctataaaatgtgcgttctttttatttgaaaaaattaggagattcttatggaattagtatttatccgtcacggttttagtgaatggaatgcgaaaaacttattcacaggctggcgtgatgtgaatttaactgaacgtggtgtggaagaagcaaaagctgcgggtaaaaaactgttagacaaaggttatgaatttgatatcgcatttacctctgttttaactcgagcaatcaaaacttgtaacatcgtgttagaagaatcccatcaattatggattccacaagtaaaaaactggcgtttaaatgaacgtcattatggtgctttacaaggtttagataaaaaagcgactgcggagcaatacggtgacgaacaagttcatatttggcgtcgttcttacgacatttctccaccagatttagatccacaagatccaaattctgcacacaatgaccgtcgctacgcaaatattccatctgatgttgtgccaaacgcagaaaatttaaaattaacattagaacgtgcattaccattctgggaagatcaaattgcaccagcaatgctttctggcaaacgtgttttagtggttgctcacggaaattcacttcgtgcgttggcaaaacatattatcggtatttctgatgctgaaattatggattttgaaattccaacaggccaacctttagttttaaaacttgatgataaattaaattacgtagaacattactatctttaattaagttcaacgtattgttgttctaactgtataaaacaaaaccccgcaaattagcggggtttttaagcaagtccaaattattttgtgcttggaattttgaaacggctgttgaaacgctcgacacgaccaccagtatcaacaacacgttgtttaccagtgtagaatgggtggcagttaccacacacatcaagattgatgtctttgcctaaagttgaacgtgttttgatcacattaccgcaagaacaagtcgcagtaatttctttatattctggatgaataccttgtttcatagaaaaacctcaaaatgaagccacgccgctataggaactttctccccacaccgcgtgagtgaataatacgccataattggcaccaaataggttgcgaattatactgaaaaaatgcagataaacaagctctattttcgtgtaaaatcatcagcatttttaaccgcacttttctttttatgttagcaaaatcttccatcaatgtgccatttgccaaatctgttttagcttggtacgacaagtttggacgcaagcatttaccttggcagcaaaataaaacgctttatggtgtatggctttctgaagtgatgttgcaacaaacgcaagttgcgacggtaattccttattttgagcggtttatcaaaacatttccaaatatcatcgcacttgccaatgcttcacaagatgaagtgttacatttatggacaggcttaggctattatgcacgagcgcgtaatttacataaagccgctcaaaaagtgcgggatgaatttaatggaaatttcccaacaaattttgagcaagtttgggcgttatctggagtgggacgttcaactgctggtgccattttatcttctgttttaaatcagccttatccaattttagatggtaatgtgaaacgtgtgttggcacgttattttgctgttgagggatggagtggcgagaaaaaagtagaaaatcgcttgtgggcattaacggagcaagttacacctacgacgcgtgtggcagattttaatcaagcaatgatggacattggtgcaatggtttgcacgcgaactaagcccaaatgcgatctttgtccgttaaatatagattgtttggcttataaaaatacaaactgggaaaaatttccagctaaaaaacctaaaaaagcgatgccagaaaaaactacctattttttaattttgtcgaaaaatggcaaagtatgtttggaacagcgagaaaactcaggattatggggcggattattttgttttccacaatttgaagataaatcctcgttgcttcattttttagcccaagaaaaagtcacgcattatcaagaatggccgagttttcgacatacatttagccattttcatttagatattcatccaatttatgccgaaatggagagtactttatgcgtagagcaggctaatttagactggcgaaaagtgatggaaagcacaaaagaataccaatcaaacctatcaagtgcggtcaaatattggtatgatccacaaaatcctgaaccgatcgggctggctcagcctgtgaaaaatcttttaatacaatttgtaaggaatcattatggcaagaacagtattttgtgaatatctcaaaaaagaagcggaaggcttagattttcaactttatccaggagagttggggaagcgtatttttgattcagtaagtaaacaggcttggggcgaatggattaagaaacaaacgatgcttgtgaatgaaaaaaaacttaatatgatgaatgcagagcaccgtaaattattagaacaagaaatggttaattttttgtttgaaggtaaagatgttcatattgaaggttatgttccaccatcaaattagttatctatcctacaatgaaaaaatatttattattggcattattgccttttttgtatgcttgtagtaattcatcgaatcaaggtattaactatgatgaagcctttgctaaagacacgcaagggttagatattctcacagggcaattctcgcataatattgaccgcatttggggcgtcaatgaattgttagtggctagtcgaaaagattacgtgaaatatacagattctttttatacgcgtagccatgtgagttttgatgaaggtaatatcgttattgaaacccagcaagatttaaatcgattacataatgctattgttcataccttgttaatgggagcggatgcaaaaggtattgatttatttgcatctggtgatgtgccgattagctctcgcccattccttttggggcaggttgtggatcatcaagggcaacaaattgctaatcaagttatcgcaagtaatttcgccacttatttgattcaaaataaattgcaaactcgtcggttacagaatgggcataccgtgcaatttgtctctattcctatgattgcaaaccacgtagaggtgcgtgcgcgaaaatatttaccattgattcgtaaagctgcacaacgttatggcattgatgaaagtttgattttgggtattatgcaaacagaatcaagttttaacccatatgcgattagctatgccaatgccattggtttaatgcaggtagttcctcacactgcgggtcgagatgtatttacaatgaaaggcaaaggtggacagccatcaacgcgttatttatatgatcctgcaaataatattgatgctggcgtgtcttatttatggattttgcaaaatcaatatttagatggtattacaaatccaacctcaaaacgttttgcaatgatttctgcatataatagtggtgcaggtgcagtgttacgtgtttttgataatgataaggatacggcgatttacaaaatcaaccaaatgtatccagagcaagtttatcgtattctaacgactgctcacccatcatcacaagctcgcaattatttgttgaaagttgataaggcacagaaaaaattccgtgtaagacgataattagatttgtttatataatcaaaatgctcgctggctaacaccatcgagcattttttattaaaaagtgcggcaaattttaaaatagtttttattatttcgttgttttaataaacatattgatgattaactattcaaacgaaatattttttccatttttttgaatttagttattgaccgaaaaccgaaaaaatagtttaatacgcctcgttgtcaggcagtagccaataacgataacgcctcgatagctcagtcggtagagcaggggattgaaaatccccgtgtcggtggttcgattccgcctcgaggcaccatttcctccttagttcagtcggtagaacggtggactgttaatccatatgtcgcaggttcgagtcccgcaggaggagccaaattcagaaaagccgctaaagaaatttagtggctttttgctttcttatatataaaatatataatcttctctagtcttgtaactataactaggcatcaaaattcaaaatggcgtatcaatgagcgagagccttcttatttttgatgttagcaaacgacctaagtcgcttgcgtttaacttaaagaagaaaaatgagtcggcttttattttggaatagatttatttttcacgatcatcgatggtttgtagcaaataatttccctctgcatcagcaagactgcggaaacctacattcgtgattttgtagggatactttgttcgataagtaaagttttcgtgatgatgtccgtggaatactagcttaacccccatcttcattgccaaatcattaattacttggaaacccatcggatgtggtttaggggcttcgtgacaaatcaacacatctgcttgttggttttctaagatttcaatatcggatggaaaaattgacgtgcgatgacgcaaaggcacaccgcctcgccaaatcttctcctgtgggctatattggcaataatgaataggatcaaaaaacatggggcgatttggtggcatccaaatttgcccacggaatacaccgcctaatcccgcaatgcgagttccttgaatatcaactacgcgattgtgcaaattgcgtgattgccacttagaaccccaaattgcattaaaagcactaatggttttgctatcatgatttccatgaataaaccaaatatcacaatgttgtgcaagtttatccaattcatctgctgtcgtgagctgtaaatcgcctaaaattatcagtgcgacattttcctgttcttttataaaagggtaaatgtgatcatagcttccgtgcggatctccagcaaataaaatcattgagatatcccctttataggaaaagttgcgttttgtaattcactgatttcttcttcatttaacactttctcaatgacggctttaacttggttataacgttcaagataacttggcgattcaatctctatgtaaggaactttatatttatctaacagttttttgagtagttgttgaaattgttggcgttgcttttgtgaacctaagctacgcaagccatcatccacccattcagtattatttttaagcaaaatagtgacatcgaagggatattctttaatcattgagtctaaaaatggatgagcttttccttcatattgaatgcagaacgcttgcgtggtaatgaaatccgtatcaataaatgcaattttatgagaatggcgcacggcataatcaatgtatcgttgatgaccaagcgccatttgcggatagtcagaatattgcatcgcttgctcgtcgccaccgagcttttcaaatacaaattcacgcccgtattcccacgcagaagtggtattaaatacggcggctaacttattaactagcacgcttttaccactgctttctccccctaaaatcgccaccgttttggcaaagaaaggacgagcttctttcggaataaacttccaatattggaatggagtggtgcgaattttggttgcggacacattaaagaaagtgcggtcaggatcgactaacgatacttctaaacctaagtatttctcgtaaggcgctttatcttgaggctcgctactaaatacgattgaaggttcaaaatgtttttcatgaaatagggttttaactgcttcactccaagattgccagccgtttggataacttggaataccgtcttcaatcaaatgatgaataaaaatctgatttttttgatatttgaaaatttgctgcatccaacgcaaacgatcttgcacggttggcatgcgtttcattttactatcgtaaaataatttcaaatcacgttccgtatcactacacacgataacgtgcagttcatcgactttactgaacgcttcataaatcatatttatatgacctgtgtgtacaggataaaatttcccgaaaatgacaccgacttttttctcttttgtttttgacataatctgctcttgatagcgtaagaattgagtgtgtttattgtaggctaaatgaaaatatttttcacgttctgatttagtgcctaggtattttgcgttatacttagctcgcattctcagggcagggtgaaattccctaccggtggtaaagcccacgagcgtttaaaagtgcggtcaatttttggcaaatttttcttgctaaattgtcctgattttcacttttaaagtcagcagatttggtgaaattccaaagccgacagtaaagtctggatgaaagagaataaaacgagttgggttcccaaatcgttcattttatttgcatttctcagccctgattctggtatttaattgaaatctcaaattaggaaattactatgaatcagtcaattttatctccattcggcaacaccgctgaagaacgcgtacttaatgcaattaatgcctttaaaaatggaactggcgtattagttttagatgatgaagatcgtgaaaatgaaggcgatttaattttcccagcagaaacaatcacgtcagaacaaatggcaaaattaattcgttatggcagtggtatagtttgtttatgcattactgatgaacgttgccaacaactcgatttaccgccaatggtagaacacaataatagcgtaaacaaaacggcttttactgtaacgattgaagccgcaaaaggtgtttctacaggcgtatctgccgcagaccgagtaaccactattcaaacggctattgctgataatgcagttccaacagatttacatcgtccaggtcatgtcttcccacttcgtgcagcaaatggtggcgtacttactcgtcgcggacacacagaagcttccgttgatttagcgcgtctggcaggatttaaagaagcaggcgttatttgtgaaattacgaatgacgacggcacaatggcgcgcacccccgagattgtagaatttgcgaaaaaatttggttattcggtgctaaccattgaagatttagttgaatatcgtttagcacataatatttaaaacgaagaagtgcggtgaaaatttctatgatttttttaccgcactttttatattatactgttccaactttttatttatttgggttacttattatgcataatgcagctcagcacaattatgttatcagtttaactaccgaacaaaaacgccgaaaacacattaccgaagaattcggtaagcagaatattcctttcgaattttttgatgctattacgcccgacattattgaagaaaccgctaaaaaatttaatatcatctttgaccgttcatcaaaagcaactttgtgtgatgctgagatagcctgtgcattaagccatatcgttttatggaatttcgttttagaaaataatttagattatattaatatttttgaagacgatatttatttgggagaaaatgcaaaagaattgttgaatattgattatatacctgaagatactgatatattgaagttagaagctcatggaaaaataatttatggaaagtgtgagcaaataaaatgtaatagaaatatttcccgattgaaattcaaacatactggaatggctggctattcaatcacagctaagggtgctagatatttattgaataacataagaaataaacaactttatcttgctattgatactctaatttttgatgaattattaggcaaaaaagattataaagttatgcaactttcccctgcaatatgcgctcaaagttttattctgcatgatgaaaattattttgagagtagtttgcataatggtagggaaaaagtgcataaaaaccaaattcccgctaaacctttagctaaaataaaaaatgaactaattagaataaaaaaacggatattcggaaaacaagttccatttaaataataaaagtgcggttaaaaatcttattaaattttaaccgcacttttttgtttattttacttctggtaaatttaccgcacctttatagcctaattgtcgccacgcttcataaaccgttactgcgacagaattagataagttcatactgcggctattggcagtcattggaatgcggattttttgttccatcggcatttcatttaaaattgacatcggaatgccacgagtttctgggccaaacattaaataatccccaagtttaaatttcacctggctatgagctggacagccttttgttgtaagtgcaaaaaggcgtttgggtttttcgctttctaaaaaggcttcaaaggttttgtggcgtttgatttccgcaaattcgtgataatccaaacctgagcggcgtaagcgtttatcatcccaagtgaaacctagtggttcaattaagtgcaagcgaaatcctgtgttggcacaaaggcgaataatgttaccggtattttgtgggatttctggttcatataaaacgatatctaacataattttctctctaattctgatataaacgatagctcactattcccgtcgttttttctttcaataacgtccagttttcaggagtaataagcggtttatctttctctgtttctacgtaaattaacgcattgggttttagccagttattttcacaaagcaaactaattgcttgttctgccaaattaaaatgaaagggtggatccaaaaatacgacatcaaagtgcggttgattttgtggctgttttagaaaatccaaactactttgattaattacttcagcctgttctgatgagcatttgagtgtttgtaaattcttttttaattgattggcaacagttttatctagttctaaaaaagtcacttttttcgcttggcgagaaagtgcttcaaaacctaatgaaccactccccgcaaaaccatctaaacattcagattggtggatataaggcattaaccaattaaaaagcgtttctttcactctatcgccagttgggcgtaagccttcagaatttaatacgggaagttttcgccctcgccatagacctgcaataatgcgaacttcgccctttgcatttggcgtttgtatttttttcataaagattcgatttttattgaaaattgtgcttagtttagacgattttttgctagaatgaacgacatttttatcggattacagttaagagagcattttatggctgaagaaaataaaaaaggcggattttgggcatcgttatttggacgtaataaaaagcaagatgaacctaaaattgagccaataattgaagaagaaaagataaaagatatcgagccgtctattgaaaaatttgaagctaatgatttagtcgaagaagaaaaaatacaggaaatttcaaccgcacttgagccgattgaagaaatcatcgaagcgaaaaatttagaagatgatcttcagcccgttgttgaaattgaaactcgcgaaaagccaagtgaagggggcttttttagtcgtttagttaagggattactgaaaactaaacaaaatattggcgcgggttttcgtggttttttcttaggaaagaaaattgatgatgagttgtttgaagaattagaagaacaacttttaattgcggatattggtgtgccgacaacaagtaaaatcatcaaaaatttgactgaacacgcaagccgcaaagaattacaagatgccgagcttttatatcaacaattaaaagtagaaatggcggatattcttgagccagtagcacaacctttagagattgatagcacgaaaaaaccttatgtgattttaatggtgggcgtaaatggcgtgggtaaaacaacgacaattggtaagctcgcacgtaaatttcaggctgaaggaaaatcagtgatgcttgcggcgggcgatactttccgtgcagcggccgttgagcagcttcaagtttggggagaacgcaatcatattccagttgttgcgcaaagcacgggttctgattctgcgtctgtgatttttgatgcgatgcaatcagcggctgcacgcaatattgatattcttattgcggatacggcgggtcgtttacaaaataaaaataacttaatggacgaactgaaaaaaattgttcgtgttatgaaaaaatatgatgaaactgcgccacatgaaattatgcttacgctggatgctggcacgggacaaaatgccattagccaagcgaagttatttaatgaggctgtgggtttaacaggaatctctctaacaaaattagatggcacggcaaaaggtggcgtgatttttgccatagccgatcagtttaagttgcctattcgctatatcggtgtaggcgagaaaattgaagatttacgtgagtttaatgcgaaagaatttattgaggcattattcgttcatgaagaagaataaaaagaataaggaagaattgtgattaagttctcaaatgtttctaaagcctatcatggtgcaacgcagccagcgttacaaggcttgaattttcatcttccagtgggaagtatgacttacttagttgggcattcaggcgcagggaaaagtacattactcaagcttattatggggatggaaaaagccaacgcaggtcaaatttggtttaacgggcatgatattactcgcttgtcaaaatatgaaattccatttctgcgtcgccaaattggtatggttcatcaagattatcgtttattaacagatcgtacagtggtggaaaatgtggcattgccgttgattattgcaggtatgcatccaaaagatgcgaatactcgagcaatggcatctttagatcgtgtaggattgcgtaataaagcccactatttgccaccgcaaatttctggcggggaacagcaacgcgttgatattgcgcgtgcgattgtgcataaacctcagctcttattggcagatgaaccaacgggtaatttagacgatgaactttccgtagggatttttaatttgtttgaagaatttaatcgtctaggaatgactgtgttaattgctactcacgacattaatttaattcaacaaaaaccaaaaccttgtcttgtgcttgaacaaggttatttacgttattaaggaataatcatgagccgatcaacggatgcatctgtttttgttcaaacagcctatactttgcgtgcagtatgggcggatttatggcaacgtaaatttggcacgctgctcacgattttagtgattgccgtttcgcttacgatcccgactgtgagctatttaatgtggaaaaatttgcatttagccaccactcaattttatcctgaaagtgaattgactatttatcttcataaaaatttaagtgaggaaaatgcgaatttagtggtagagaaaatccgtcagcaaaaaggcgtggaatcactgaattatgtttctcgtcaagaaagtttaaaggaatttaaaagctggtctggctttggcgaagaattagaaattttagatgataatccattgcctgcggtcgttatagtaaaaccgacgagcgaatttaatgtttcagaaaaacgtgacgaattacgtaccaatttaaataaaattaaaggcgtgcaagaagttcgcttagataacgattggatggaaaaattgaccgcactttcttggttaatcgcccatgtggcaattttctgcactgtattaatgacgatagcggtatttttagttattggtaacagtattcgctctgatgtgtacagtagccgatcaagtattgatgtgatgaaattgcttggtgcaacagatcagtttatccttcgtccttatctttatacagggatgatttatgccctgttgggtgggttagttgcagcaatttttagtagctttattatcagctattttacttctgcggtgaaatatgtaacggatatttttgccgtccaattcggtttgaatggattaggcgttggcgaatttgtattcttattagtgtgctgtttaattatgggctatgttggggcgtggattgccgcgacaaggcatattgcgatgatggagaggaaagaataattggatatcaaaagaaaagcgaatttcttaaaagaaattcgcttttttagttagaagtgaaatatttcgctgttgtagtttaggaagtaaatagttataagcgttctacaatcatagaaataccttgaccaccgccaatacaaagtgtagcaagtccaagttttttatctttttcgataagattgtgcaataacgttactaaaatccttgcaccactcgcgccgattggatgcccaagtgcgatagctccaccatgaatattggttttattcatatccaaattgagatctttgccaacacctaagaactgtgaggcaaaggcttcatttgcttctatcagatcgatatcatcaagatttattcctgcttttttcaatgctttttgcgttgctggaactggacctaatcccataacagatggatctaccccaccgctggcatagcttctaatttttgcaatggcttttaatccaagtgcatgagctttgctttcgctaactaaaataagtgctgcagcaccatcattaatgccagaagcgttacctgcggtgacagtaccctcttttttgaaagcaggttttaatttagctaaaccttcagctgtagtatctgctttaggatactcgtctcgtgaaacaataatgtcacctttgcgagtttttaccataacagggacaatttccttatcaaatacacctaattgcacggcttgagatgctaaggtttgtgaacgtaatgcgagttcatcttgtgcttggcggctaataccatattgttctgcaatattttcggcagtaatccccatatgatagtgattgctagcacaagttagtccgtcttcaatcattgtgtcccttaatgtgagattacccattttgacgccttgtcgtactttgctatctaaaagataaggtgcttggctcatattttccatgccacccacaacaacaatatcagcatcaccactgataatagactgtgcacctaatgcgacactttttagaccagatccacatactttattgattgttaaagaagggatttctttctctattcctgcttttaatgctgcttgacgggctggattttgtcctagtcctgcttgtaatacgttccccatgatgacttcattaactaatgcactttcaatgttggcacgtttgatggcttcttgtatcacaattgcacctaaatcaaccgcacttacggaagataatgcaccattaaagctgccgatcggtgttctaactgcactaacaataacaacattttccatttttaactccttttctataagaaatataaaccaataataaaaattggtgcggtgaagataagtgcggtcatacagaagcccataatatctctcacgccaagccctgcgatacccagtgctggtaatgcccaaaatggctgagccatgttcatccattgctcaccataggcaatcgccattgtagacttacctagatctgcacctaatgcttgagcagcagggataacaaatggtccttggatgacccagtgaccgccaccagaaggaactgcaaagttaataaaggcagaactaaagaaggttaataatgggaaagaatctttgttagcaacattgataaagaattcggtgattaaaccacctaagcctgaatgctccatcattagttgcacacccgcatagaatgggaattgcactaagatccctgctgtgcttcgtgtggcattaataattgctcgcatataggccattggcgagccatgaagcacaattcctgtgattaagaaaataaggtttacattattaattgtgagattgaatccgtttttgtagaaatacataccgaggtaactatatcctaatgccccgattgtataggctaagaagcggctttcttccattttttcagcaagtgttgcatctttatccaattttttatcaaatgttggatcgggcgcaataagttttggatcaatactttttgtttcgccatttttgggcatcatcatataggtaatgaaaggcaagcaaatgactaaacttaacgtgataaaaatattgtacccagagaaaagcgtactaactgcaggaataataccttgtgggttgctttcgctcaccattaaatgagcaactgggttgcctggtgttgcggctaaaagtggcattgagcctgaaaaacctccaccccatgtcataaatgcaatataggcacaggcaatcagtaaggcgtagtcactgccttttattctccgcgcgacttcttttgcaaacatcgcaccaacgaccaaaccgaagccccagttaatgatacaggcaattgaacccataaacgtaactaagacaacaccttgtgctggtgtttttgctattgaagcgattgtagaaagaaacttacgaatttgtggtgaggttgcaagagcattaccagttacgacaattaatgccatttgcataccaaaaccaagtaaattccaaaagccattaccccacatattaactaaatcaacaggtgtactatcggttaatccccaagcacaaatgaatgtgacaaaggtgagtaacacggcaaaaataagtgggtctggcaggtatttactgacgaatgtcgtcataaaacgagaaacgcgactaatcataattaaagtcctttttggctgatttgcatttctttgaaatcatcggcaacaatgaaatcggcttctgttttggctttaattgtttctaaatccacatgaggagcatgttcttttagaactaatctgccttcaatgaagttaaatactgccaattcggtaaccaccatggcaacttttttacttgctgtgagcggtaatgtacatttctttagaatttttgaggaacctgacttggcacaatgttccatgccaataatcactttttttgcaccagtcactaagtccattgctccgcccattcctggtaccattttgccaggcaccatccagttagcgagatttgcttcttgatcaacttcaagtccacctagcacacaggcatcaacatgaccgccacgaattaaagcgaaagaaaaagcgctatcaaaagtagcgccgccttttttaattccacaaggctgaccaccagcatttactaagtttgaattagcattttctgggtcaaatgcagttaaaccaagaaagccattttctgattgaagtgtaatattgacattatcaggtaaataattaacaacctgtgttggtaaaccaataccgagattaacaatatctccatcatgtaattccatcgcaattcggcgagcgattaattcttttgcattcatggcgttctccttattctgaacaaacaatgtaatcaattaatgcggctggcgtgatgacttcatctgggggtaactgaccgacctctagtagattatcaacttgggcaatgacagttttggctgctaaagcaactagtggattaaagttcctagcagataattcataagctaaattgccattcatgtcacctttttgagcatggataatggcaatatcagcttttagtgggagttcaagcaaatattctttgccatcaatttgaattttttgttttccttcttcaacaacagtgccgacacccgttggtgttaaaataccacctaatccggcgccacctgcacgaatccgttcagctaaggtaccctgtggaacgagttctacatctatttcaccagcaatcatttttttgccagtttctggatttgtaccaatatgggaggtaattaaacgtttgactcgattatttacaattaaagggcctacgccagtgtcaataaaggctgtgtcattgcctatgagtgtgagatcctttacgccagaatctaagatttgttggacaagtttggctggagtgccgatacccataaatccaccaaacatgatgctcataccatcatgtaggtgttgatttagattattaagcttaagatgtttttgtgtcatagagacctcctaataacgagattaaaagaaagaatatcaacaaataagtatcttatatttcaaatggatatgtttcttgtgatgatccttgataggcgataaaggaactagattgatattaaaaatagcaaaaaaaatttcgtaaaagaaatacatctttcttaggcgggtataagttattttgatagtgttttaaacaatccttgtgctatattttgtaaaaatggcagtccttagggggatgaaaatgatggatattaggcatctaagatattttgtttcaatcgtagataatgattttaatttaagccgagcgtctcaaaatttatatgtgtctcaacctgcattaagtatgatgattacggagtttgagaatcgtgaaaatattcagatatttaaacgggcatcaggaaaaattattggactaacctttgcgggggaaaattattatcgtgatgcaaaagaagtgatcaagcgttacaatgatatgagaacaaatctttataaatcaaaagattgtaagaaaggcacgataacaattggtattcctcccttagttttatcagccgtgttctcttctgtattgcctcatcttattcttaagaatccagatattaattttattattaaagaaattggagcttatgctctaaagagtgaacttcttttagataaagttgatttagccgtgttgttatatcccgagcgaatatcaaaaaatattattgattcaattgaaattcatagttctgaattagccttatttctttcaccaaagcatgttttagcaaaaaaacaacaaatcacatgggctgatttacatcagcagaaaatggcaatttttgatcaaacatttatgattcatcatcatttgaaggaagcttttgagcgcaataattgttatccagatattgttttggattcgagttgttgggattttctgctaagtgcggtcaaaacaaacaaagaattattaactattctaccgttacctatggctgagctttatcattcaaaagaatttttgtgtcgtaaaatcgaaagtcctgttccgtggaaagtgacactatgtcgtcaaagaaaaacggtctacacacatcttgaagaatatatttttgataaattattagaggcttttaggccaacaaaatagttaaaataaaagcttgcaaatagggttgtctttctatagaatctacgagctctcaatatgagagccgtttaatgtaatcatttattgaacgggcatgacgatatgtcaggctaacaatgtttccgatttggagactatataacaggtaacttgcacctccttttctattttgaagttagaattgtgattggtgttagtttttttattagctaaattttattggagctctggtctaatgcagaaccaaagaatccgtatccgcttaaaagctttcgatcaccgtttgatcgatcaatctactgcggagatcgtagaaacagctaaacgtactggcgcacaagttcgtggtccaattcctttaccaactcgtaaagagcgtttcaccgtgttgatttctccacacgtaaacaaagacgcacgtgaccaatacgaaattcgtactcacaaacgtttagtagatatcgtagagccaacagaaaaaactgttgatgcattaatgcgtttagatttggctgccggcgtggacgtgcagatcagcctaggttaattaagaggttattacaatgattggtttagtcggtcgtaaagttggtatgacccgtatcttcaatgaagacggtgtttctgtaccagttaccgttatcgaaattgaagccaaccgcgtaactcaagttaaaactcttgaaaacgatggctatactgcagttcaagttactactggttctaaaaaagcgaatcgtgtaactaaacctgaagcaggtcatttcgtgaaagcaggtgttgaagctggtcgcggtttatgggaatttcgtactgaaggtgaagaattcactttaggtcaagaaatcaatgtagacatctttgcagatgttaaaaaagtagatgttactggtacttctaaaggtaaaggtttccaaggtggtgttaaacgttggaacttccgtactcaagatgctacacacggtaactctttatcacatcgtgtacttggttctattggtcaaaaccaaacaccaggtcgtgtgtttaaaggtaaaaaaatggcaggacatttaggtgctgagcgtgtaactgttcaatcacttgaagttgttcgtgtagatgctgagcgtaaattgctattagtaaaaggttctgtacctggtgctatcaatggcgatgttatcgttaagccggcagttaaagcataagtctaggagatagagatggaattacaagttgtaggtgcaaacgcactcactgtttctgaaactaccttcggacgtgagtttaacgaagcgttgatccaccaagttgttgttgcttatgcagcaggtgcacgtcaaggtactcgtgcgcaaaaaactcgtgctgaagtgtctggttcaggtaaaaaaccttggcgtcaaaaaggtacaggtcgtgctcgtgctggtgatattaaatcaccaatctggcgttctggtggtacaaccttcgcggctaaaccacaagatcacagccaaaaagtgaacaagaaaatgtaccgtggtgctatcaaaagcattctttctgaattagttcgtcaagaccgtttggttgtggtggaaaaatttgaattagatgcaccaaaaactaaagttttagtacaaaaattaaaagatttagccgttgaagatgcgttaattatcacagcaagtttagatgaaaatctattcttagccgcacgtaacttatataaagttgatgtacgtgatgttcaaggtatcgatccagttagcttgatcgctttcgataaggtgattgttactgttgatgctgtgaaacaaattgaggagatcctagcatgagtcaagaacgtttgctaagcgtgctacgtgcaccacatatctctgaaaaagcaactaacaatgctgaaaaatctaacactgttgtacttaaagttgctttagatgcgaacaaagctgaaattgctgctgcggtggctcaattatttgaagtaaaagtagattcagttcgtactgtggttgttaaaggtaaaactaaacgccgtggtaacaaaatgggtcgtcgcagcgactggaaaaaagcttatgtaactttagccgaaggccaaaacttggacttcgtggacagtgcagagtaatcggaggaaattagagaatggctatcgttaaatgtaagccgacctccgctggtcgtcgtcacgttgttaaaatcgtgaaccctgaattacacaagggtaaaccttacgcacctcttctagatactaaatctaaaactggtggtcgtaacaactatggtcgtattactactcgtcacattggtggcggtcacaaacaacactaccgtttaatcgattttaaacgtaacaagttagacatccctgcggttgttgagcgtttagaatatgatccaaaccgttctgctaacattgctttagtgctttataaagatggtgaacgccgttatattttagcacctaaaggtttgtcagtaggcgatcaaatccaagctggcataaactcaccaattaaagtgggtaactcattaccaatgcgtaatatcccagttggttcaacagtacataacgttgaattaaaaccaggtaaaggcggtcaaatcgctcgttctgctggtgcttatgtacaaatcatcgcacgtgaaggcaactatgtaactttacgtttacgttctggcgaaatgcgtaaagtattagcggaatgtgttgctacaatcggtgaagttggtaactcagaacatatgcttcgcgtattgggtaaagctggtgctaaccgctggagaggtattcgccctacagttcgtggtactgcaatgaacccagtagatcacccacacggtggtggtgaaggtcgtaactttggtaaacacccagtaactccttggggcgttcaaactaaaggtaagaaaactcgtcacaacaaacgtactgataaatatatcgtacgtcgtcgtggcaaataatagattaaattaaagaggattagccatgccacgttctctcaagaagggtcctttccttgacctacacttgttgaagaaggtagagaaggcggtggaaagcggggataaaaaaccaatcaaaacttggtcccgtcgttcaatgatcattccatcaatgatcggattgaccatcgcagtccataatggtcgtcagcacgttcctgtttatgtatctgatgaaatgatcggtcataagcttggtgaatttgcaccgactcgtacataccgcggtcacgcggcagataagaaagctaagaaataagaggtaaagagatggaaactatcgcaaaacatcgttacgctcgcacttctgcccaaaaagctcgcttagttgccgatttaattcgtggtaaaaaagttgcgcaagcattagaaattttaactttcactaacaaaaaagcagcagctttagtgaagaaagttttagaatcagctattgcaaacgcagagcacaatgacggtgcagatattgatgatcttaaagttgctaaaatcttcgttgatgaaggtcctagcatgaaacgtgttatgccacgtgctaaaggtcgtgcagatcgtattttaaaacgtactagccacattactgtggttgtgtcagatcgttaataagtagaggaatagcaatgggtcaaaaagtacatccacatggtattcgcctaggtattgttaaaccttggagctctacttggttcgcgaatacacaagacttcgctgacaatcttgaaggcgatttcaaagtacgcaaattcttaaataaagaattagcaaatgcttcagtttcacgtattactattgagcgtccagctaaaagtattcgtgtaactattcacacagctcgtcctggtatcgtaatcggtaaaaaaggcgaagatgttgaaaaattacgtaacgcagtgtctaaaatcgctggcgttcctgctcaaatcaacattgctgaagtgaaaaaacctgaattagatgcgaaattagttgcagatagcatcgcttctcaattagaacgtcgtgtaatgttccgtcgtgcaatgaaacgtgcggtacaaagtgctatgcgtttaggtgctaaaggtatcaaagttgaggttagcggtcgtttaggtggtgcagaaatcgcacgttcagaatggtatcgtgaaggtcgcgtacctctacatactcttcgtgcggacatcgattataacactgcagaagctcacacaacttacggcgtaatcggcgttaaagtgtggatcttcaaaggtgaaattcttggtggaatggctgccgttgcgcaatcagaacaacaacctgccgacaagcctaaaaaggctcctcgcggtaaaggtcgtaagtaaggagaaacgctaaatgttgcaaccaaaacgtacaaaattccgtaaagttcacaaaggccgcaaccgtggtatcgcgagcggtactgaagttagtttcggtacttacggtttaaaagcagttggtcgttgtcgtttaaccgctcgtcaaatcgaagcggcacgtcgtgcaatgtcacgtgcagtaaaacgtcaaggtaaaatctggattcgtgtattcccagataaaccaattactgaaaaaccattagaagtccgtatgggtaaaggtaaaggtaacgttgagtactgggtagccttaatccaaccgggtaaagtgctttatgaaatggatggtgtgtctgaagaagtagcaagaaacgcatttgcattagcagctgctaaattgccagttaagaccactttcgtaactaagacggtgatgtaatgaaagctcaagatttacgtacaaaaagtgttgaagagctgaatgctgaattagtaaaccttttaggtgaacaattcaagttgcgtatgcagacagccaccggtcagcttcaacaaacccatcaggctaaacaagtgcgtcgtgatattgcacgtgtaaaaactgtattaaccgaaaaggcgggtgagtaatgactgataaaattcgtagcgtacaaggtaaagttgttagcgacaaaatggaaaaatctttcgttgttgctattgaacgtaaggtaaaacaccctttatatggtaaatttatccgtcgtacaactaaattacacgtacacgatgagaacaatgaagccaaagttggtgataccgtagagattcgcgaatgtcgccctctatcaaaaaccaaatcttggactttagttcgtgttgttgaaaaagcagttattgcttaattaataacaaagagtaataaaataaaagccaatagtgtaaatctattggcttttttgtttttaaagtgcggttaaaattcaatgaattttaaccgcactttttcttttaggtgttattgacataacacctaaacaaatactgaaaaaaatatttttaataatggtacttaagagaaatttctgaagatcttggttttgaatattctgatgagtggaatactcgttattttggtcatagattaattaatttcatcaacggcgttgatacccgtaaagaaacgataaaattagcagaggataaattcccagaagaacttatcaatgatacagatactactgggaatatttctaatgaagattgggattggtggtgccatttatctgatacaatgaagtatatattaatacatgatcttccttatcaagaggaggagattggcatcacagagttttatgatgaaaatgatttggatacagaagcagatatatatgatcgagagacttttggaatcttattagcagaatatgtaacaggattatatttgttagatgatactttttatagagccagtgcttgataatataaatattcctaacaatgtttatagtacaaatatatttgctattcatcatgttgcaaagcatattttgggtattaaagatctagataaacgtttaaaatctggtgatattgaattagttcgtgaattaggagaagtaacaattggtggtaaggagaagtatttttactcttttgcaactaaatattgtagtcatcataatccaattgctttcccaatttatgatagctatgtggagcaagttctcctctattttaataaagtagataaattttcagcctttaaaaggaaagatttaaaaaaattacagaaaatttaaagaggttttgatagattttcaaagattttataaattagaaagatttagtttaaaagaactcgatcggtatctttggcttttaggcaaggaaattttcccaaaatctaaaaactgatgaatttatctaaggtaagagaagagagtatttcattttttctgcagtttatttttcattcgataaatttttgagaggatgaggatatttttataattccaaaagtgaggtaaattttaactggattatttagtaaatagatcaataagaggaagctaaattatcattgcctttctctttttcttttgataaaatccgccgcctatctgccattctatctgaatagtgtggatgggttcgtcccgaaagggtgtttttttaatcttaacggagcactaatatgatccaagaacagactatgctggatgttgctgataattcaggcgctcgcagcgtaatgtgtatcaaggttctaggtggatcgcaccgtcgttatgctgcgattggtgacatcatcaaaattactgtaaaagaagcaattccacgcggtaaagtaaaaaaaggtgatgtattaaaagcagttgttgtgcgcaccaagaagggtgttcgtcgcccagatggctcagttattcgtttcgatggtaacgcttgtgtaattttaaataataacactgagcaaccaatcggtactcgtatttttggaccagtgactcgtgaacttcgttctgagaaattcatgaagatcatttctttagctccagaagtactgtaaggggaatgtaatggctgctaaaatccgtcaaaatgatgaagtaattgttcttactggtaaagataagggcaaacgtggcaaggtaactaaagtgttaccaaacggtaaagtgtttgttgaaggtatcaacatcattactaaacatgaaaaaccagttcctgcattaggaaaggctggtggtttggtgaaaaaagaagctgcaattgacgcttcaaatgttgcgattttcaatcctaaaacaaataaagctgaccgtgtaggttttagattcgaagacggcaaaaaagtacgtttcttcaaatctaacaatgaaattatctaacaaactggagtaatgcgatggcgaaactgcatgattactacagagatcaagtagtaagcgaattaaaaaataaattcggctacaaatctgtcatgcaagtcccacgaatcgaaaagattaccctgaatatgggtgtgggtgaagcattgaccgacaaaaaattgctagacaacgcagtagcggacttagcagcaatcagcggtcaaaaacctttagtaactaaagctcgtaaatctgttgctggctttaaaatccgtcagggatatccaatcggttgtaaagtaacactacgcggtgagcgtatgtgggagttctttgaacgtttaattacaattgctgttccacgtattcgtgacttccgcggtttaagtgcgaaatcattcgatggtcgtggtaactatagcatgggtgtgcgtgaacaaatcatcttccctgaaatcgattacgataaagtagatcgtgtacgtggtttagatatcactatcacaactactgctaagaatgatgaagaaggtcaagcactacttgctgcctttaatttcccattccgtaaataaggcaggttataatggctaaacaatcaatgaaagcacgcgatgtaaaacgcgttaaattggctgaaaaattctacgcaaaacgtgttgaattaaagaaaatcatttctgatgtcaatgcctctgatgaagatcgttgggatgcagtgttaaagttacaaactttaccacgtgattctagcccatctcgtcaacgtaaccgttgccgccaaactggacgtcctcatggcgttttacgtaagtttggtttaagccgaattaaggttcgtgaagctgcaatgcgcggtgaaatcccaggccttaaaaaagcgagctggtaatataccactttattttggaatcggagaaaaagtacaatgagtatgcaagatccaatcgcagatatgctgacccgtattcgtaacggtcaagctgcgaacaaagttgcaatcaatatgccttcttccaagctaaaagtggcaattgccaacgtattagctgctgaaggttatatcgaaagcgtaaaagttttagaaggtgctaaacctgaattggaaattactttaaaatatttccaaggcaaaccagttgtagaaagcatccaacgtgtaagtcgtcctggtcttcgtatttacaaacgtaaagatgaattaccaaaagttatgggcggtttaggtgttgcagttatttctacatctaaaggtgttatgactgaccgtgctgctcgtcaagcaggtttaggcggtgagatcatctgttatgtagcttaatagagaggtaggaaaatgtctcgtgttgcaaaggcacctgttaatattcctgccggcgttgaagttaaactcgacggtcagctattaacagtaaaaggtaaaaatggcgagttatctcgcaaaattcatgaatcagttgaagtaaaacaagataacggacaatttacgttcactccacgtgaaggttttgttgaagcaaatgctcaatcgggtactgcacgtgcattagttaatgcaatggttatcggcgttactgaaggtttcactaaaaaattagtattggtgggtgtaggttacagagctcaacttaaaggtaacgcaattgcattaagtttaggctattctcacccagtagagcacactttgccggtaggtattactgcagaatgtccatctcaaaccgaaatcgtgttgaaaggtgcagacaaacagttgatcggtcaagttgcagcagatattcgtgcttatcgccgtcctgagccttataaaggtaaaggggtacgttacgctgatgaagtggtacgtatcaaagaggctaagaagaaataattaaggtaacactatggataagaaatcagctcgtatccgtcgtgcagctcgtgcacgtcatatgatgagagagcaaggtgtaactcgtttagttattcaccgcactccacgtcatatttatgcacaagttattgcaccaaacggttcagaagtgcttgccgctgcttcaactgttgagaaagcaattcgtgagcaagtaaaatacaccggtaataaagatgctgcagcagcagtaggtaaagctgttgcagaacgcgcattagcaaaaggcgttcaagctgttgcttttgatcgttccggttttaaatatcatggacgtgtccaaactttagcggacgctgcacgtgaagctggtctacagttctaatgaggtaaattgagatgtcaaacatcgaaaaacaagttggtgaactgcaagagaagctaatcgcagtaaaccgtgtatcaaaaactgtaaaaggtggtcgtattatgagtttcactgcattaactgtggtgggcgatggtaatggccgagtaggttttggttatggtaaagctcgcgaagttccagcagcgatccaaaaagcgatggaaaaagcacgtcgcaatatgattaatgtcgctttaaatgaaggtacattacaacatccagttaaaggtgttcatactggttcacgtgtatttatgcagccagcaagtgaaggtacaggtatcatcgctggtggtgcaatgcgtgcggtattggaagttgcaggtgtacgtaacgttctttctaaagcgtatggttctaccaacccaattaacgttgttcgtgcaactattgatgcattagcaaatatgaaatcaccagaaatggttgctgcaaaacgcggtaaaactgttgatgaaatcttggggtaatgaataatggctaaaactattaaagtaacacaagttcgtagctcaattgctcgtttaccgaagcataaagctaccttgcgtggtcttggtcttcgccatatgcaccacactgttgagttaattgatacgcctgcagtacgtggtatgattaaccaagtttcatacatggttaaagtggaggagtaagagatgcgtttaaatactctatctccggctgaaggtgcaaagcatagtgctaaacgcctcggtcgtggtattggttcaggtttaggcaagactggtggccgcggtcataaaggtcaaaaatctcgtactggtggcggtgttcgtcgcggtttcgaaggtggtcaaatgccgttataccgtcgtttaccaaaatttggttttacttcaatgaaatctgcagtgactgcagaagttcgtttaaatgaattaaccaaagttgaaggtaatgtagtaactttagaaacattaaaagcagcaaatatcttaactaaagatatccaattcgctaaagtaattttagcaggagaagtgaaatctgcagtaacggtacgcggtttacgtgtaactaaaggtgcaaaagcagcaattgaagctgctggcggttcaattgaggaataattagcaaatggctaaacaaccaggttatcaagcaagaagtactaatagcggtaaaggtgaattaaaaagccgattacttttcgttttaggtgcacttatcgtttatcgaattggttcattcattccggttcctggtattgatgcggctgttctagctcaattagttgaacaacaaaaaggcactatcattgacatgtttaacatgttctctggtggtgctctaagccgtgcatccattttagcattaggaatcatgccatatatatcggcatctattgtaattcaattgcttgcaacggtttctcctgctttagcagaattaaagaaagaaggtgctgctggtcagcgtaaaatttctaaatatactcgttatgcgacagttgtttttgcaacgattcaggcagtagctatttcaacaggcttaccaaatatgttgtctggcttagtgccaaatgttggatttagtttttacttcacttcagttgttagtttagtcactgggacaatgttccttatgtggttgggtgagcaaataactgaaagaggtattggtaacggtatttcaattcttgtttttggcggtattgtagctggtttaccatcggctattcttcaaactattgagcaggctcgtcaaggacagatgcatccattagttcttcttctgatcgcagctattgtatttgcagtaacttattttgttgtttttgttgaaagaggacaacgtagaattcgcgttgaatatgcgaagcgtcagcaaggtcgtcaaattttaggtggtcattcaacacatttaccattgaaagtgaatatggcaaatgtaatgccagcaatttttgcttcaagtattattttattcccagctacattaacacaatggtttgggcaaaatgataaatttgaatggttaaataatttatcaatgttattgaatcctggtcaaccactttatttgcttgtttatgctgttgcaattattttcttcagctttttctatacagcaatgcaatataatcctcgtgatacagcagataatctaaaaaaatctggtgcatttattccaggaattagacccggtgaacaaacatcacgttatattgataaagtgatgactcgtcttacattaattggcggtctctatgtaacgtttgtatgtttagttccttatattatgacatcggcttgggatgttaaattttacttcggtggaacatctcttttaattgtagtcgttgtaattatggatttcatcgttcaggttcaaagtcatttaatgtcttctcaatatgaatctgcgttgaaaaaagcaaaccttaaaggttttggacaataattgttcatttaaagtaaaaggataagcaatgaaagttcgtgcttccgtaaagaaaatgtgtcgtaactgtaagattgttaaacgtgagggtgttgtacgcgtattgtgtagcgaccctaaacacaaacaacgtcaaggttaattaacatttttcttgccaagaaccagttgagtagttatactgctcaactcatttatgtccttgatattctgtttgagtatcctgaaaacgggcttttcaagatcagaatatcaaattaattaaaatataggagtgcatagtggcccgtattgcaggcattaacattcctgatcataaacacgctgtaatcgctttaactgccatttacggtattggtaaaactcgttcacaagctatttgtgcagcagcgggtattgctgaagatgttaagatcagagaattgtctgaagagcagattgacaaactgcgtgacgaannnnncattccattcattaattaattaatgaatgaatgnnnnngagagacccgcctttttttgtactgcaatttgtgcctgcgtttgcttttaaattattaatcatttcaatccgaacttgatttaaatgctgataataaactttcattcgctctgcttttgtcggatcttgggcaaacattcgttcaatcagcgatggattaatgcctgaacgataaattatatctatttgtttggctaatcgtgctttttgctcacgttcctgtttttctaattgtttgagttgcttatctgcatcggcaatttgcttacgaatttcctttaaacttatttcggtttcaagcagttcgccctcaacactgttaattttactctcgtgtttttttaaatttgcttgtaacttagcttgctcacgtttttgcttctctattttagattcttgttgcttaatttgtttttgaatttgattgagatcggaagattggctgacaggcgaaaatattaataaaccgcagcttaaaagtgcggttaataataatgatgatgttttttgattaacgccaaaacgcaacataattcatcctaaattcgtaaaactcgcaaatcttatcatatttgttaaaaggcgaaaaagtttgatggttattttttgctaaagatcaggaaatcatcccttttaacttttaaagctaaggattttttgctataaaatgtgcgttctttttatttgaaaaaattaggagattcttatggaattagtatttatccgtcacggttttagtgaatggaatgcgaaaaacttattcacaggctggcgtgatgtgaatttaactgaacgtggtgtggaagaagcaaaagctgcgggtaaaaaactgttagacaaaggttatgaatttgatatcgcatttacctctgttttaactcgagcaatcaaaacttgtaacatcgtgttagaagaatcccatcaattatggattccacaagtaaaaaactggcgtttaaatgaacgtcattatggtgctttacaaaggtttagataaaaaagcgactgcggagcaatannnnncattccattcattaattaattaatgaatgaatgnnnnnattaattggcggtctctatgtaacgtttgtatgtttagttccttatattatgacatcggcttgggatgttaaattttacttcggtggaacatctcttttaattgtagtcgttgtaattatggatttcatcgttcaggttcaaagtcatttaatgtcttctcaatatgaatctgcgttgaaaaaagcaaaccttaaaggttttggacaataattgttcatttaaagtaaaaggataagcaatgaaagttcgtgcttccgtaaagaaaatgtgtcgtaactgtaagattgttaaacgtgagggtgttgtacgcgtattgtgtagcgaccctaaacacaaacaacgtcaaggttaattaacatttttcttgccaagaaccagttgagtagttatactgctcaactcatttatgtccttgatattctgtttgagtatcctgaaaacgggcttttcaagatcagaatatcaaattaattaaaatataggagtgcatagtggcccgtattgcaggcattaacattcctgatcataaacacgctgtaatcgctttaactgccatttacggtattggtaaaactcgttcacaagctatttgtgcagcagcgggtattgctgaagatgttaagatcagagaattgtctgaagagcagattgacaaactgcgtgacgaagttggtaaatttaccgttgaaggtgacctacgtcgtgaagtaacactaaacatcaaacgtcttttagacttaggatgctatcgtggtttacgtcatcgtcgtagtttaccagtacgtggtcaacgtactaaaactaatgcgcgtacccgtaagggtccacgtaagccgatcaaaaaatagtcggggtaaataagaatggctaaaacaccagttcgtgcacgtaaacgtgtaaaaaaacaagttgtagatggcgtagcacatattcacgcatctttcaataatacaatcgttactattactgaccgtcaaggtaatgctctagcttgggcaactgcaggtggttcaggtttccgtggttctcgtaaatcaactccgttcgcagcgcaagttgcggcagagcgttgtgctgaaatcgttaaagaatttggcttaaagaacttggaagttatggttaaaggtccgggtccaggtcgtgaatctacaattcgtgcgttaaacgcagcgggtttccgtatcacgaatattactgatgtgactccgattcctcataacggttgtcgtccaccgaaaaaacgtcgtgtttaagacgtataggatagttggagaaagaaaatggcaagatatttgggtcctaaactcaagctcagccgtcgtgaaggcactgatttattccttaaatcaggcgtgcgtgcgattgattcaaaatgtaaaattgatacagcaccgggtcagcacggtgctcgtaaaccgcgtttgtctgactatggtagtcagttacgtgaaaaacaaaaagttcgtcgtatctatggtattttagaacgtcaattccgtaactactataaagaagcaaaccgtttgaaaggtaacactggtgaaaatttattagtgttattagaaggtagattggataacgttgtttatcgcatgggatttgctacaactcgcgcagaggctcgtcaattagtgagtcataaagcaattgtgtgaatggtcgtnnnnncattccattcattaattaattaatgaatgaatgnnnnncgttactattactgaccgtcaaggtaatgctctagcttgggcaactgcaggtggttcaggtttccgtggttctcgtaaatcaactccgttcgcagcgcaagttgcggcagagcgttgtgctgaaatcgttaaagaatttggcttaaagaacttggaagttatggttaaaggtccgggtccaggtcgtgaatctacaattcgtgcgttaaacgcagcgggtttccgtatcacgaatattactgatgtgactccgattcctcataacggttgtcgtccaccgaaaaaacgtcgtgtttaagacgtataggatagttggagaaagaaaatggcaagatatttgggtcctaaactcaagctcagccgtcgtgaaggcactgatttattccttaaatcaggcgtgcgtgcgattgattcaaaatgtaaaattgatacagcaccgggtcagcacggtgctcgtaaaccgcgtttgtctgactatggtagtcagttacgtgaaaaacaaaaagttcgtcgtatctatggtattttagaacgtcaattccgtaactactataaagaagcaaaccgtttgaaaggtaacactggtgaaaatttattagtgttattagaaggtagattggataacgttgtttatcgcatgggatttgctacaactcgcgcagaggctcgtcaattagtgagtcataaagcaattgttgtgaatggtcgtgttgttaatattccatctttccaagtttctgtaaatgatgtagttgctattcgtgaaaaatcgaaaaaacaagctcgtattaaagcatcattagaattagcagagcaaagagaaaaaccaacatggttagaagttgattctgcaaaaatggaaggtgtattcaaacgtgttcctgaacgttctgatttatcagcagacattaacgaacatctgatcgttgagctttactctaaataatagttaagcttaaaaccaaagagaggataaaatgcagggttctgttacagaatttttaaaaccacgtttagtagatattgaacaaattagttcaacacatgctaaagtgatcttagaaccgttagagcgtggttttggtcatactctaggtaatgcattgcgtcgtatccttctgtcttcaatgccaggttgtgctgtaactgaagtagaaattgatggcgtattgcatgaatatagtagtaaggaaggtgttcaagaagatattcttgaagtacttttgaaccttaaaggtctagcggttaaagtacagaataaagatgacgttattctgacattaaataaatctggaattggccctgttgttgcagcggacattacccatgatggtgatgttgaaattgtaaatccagatcatgtgatttgtcatttaactgatgaaaacgcttcaattagtatgcgtatacgtgttcagcgtggtagaggatatgttcctgcttcatctcgtacacatacgcaagaagaacgtccaattggtcgtttgcttgttgatgcttgttatagtccggttgaacgaattgcgtataatgtagaggcagctcgtgttgagcagcgtacagatttggataagctcgttattgagttagaaactaatggtgcacttgagccagaagaagcaattcgtcgtgcagcaacaatcttggcggagcaacttgatgcattcgttgatttacgtgatgttcgtcagcctgagattaaggaagaaaaaccggaatttgatccgattttattacgtcctgtagatgatttagagctgacagttcgttctgctaactgtttgaaagcagaaacaattcattatatcggtgatttagtgcaacgtactgaagtagaattattaaaaacccctaatcttggtaagaaatctcttactgaaattaaggatgttcttgcttctcgtggcttgtcacttggtatgcgccttgaaaattggccgccagcaagtattgctgaagactagtttggtcataggttaagatttttctgagaaggataagatcatgcgccatcgtaagagtggtcgtcaactaaaccgtaatagtagtcatcgtcaagcgatgttccgtaacttagcaagtgctttagttagtcatgaaatcattaagactactttacctaaagctaaagaattacgccgtgtagttgaaccgttaattacattagcaaaagtagatagcgttgctaaccgtcgtttagcattcgctcgtactcgcaacgttgaaactgttgcaaaattatttaatgaattaggtccacgttttgctcaacgtgcaggtggttacactcgcattttgaaatgtggtttccgtgcaggcgataatgcaccaatggcatacattgagttagttgatcgtccagaagttgctgaggcaacaactgaggaataaaaattaattctaaaaagaagctcactttatatagtgggcttttttattttataaattacaaaaatctttatctgatttaatcattacttagatatattatttacaatcagcgagcagtggtaaattttaagagcatattcgtagatgtcgtgtatttttatctaaaattccttgttttttaagctctctactaatacgaattgcggtttcagtttcacatccacaaaattccgctacttctcggtaggtccaaggataatcgggataactttcagttaaattttcaatggcatcaataatacgttcgtaactacgcttataagctgtattacttattcggtgttctgcatcatataattcattagaaagttgtttcataagataacaagaaaaatcagggttatttgcaataaaatttgcgtgattaccaggaaatattctaactatatcggcttccattaatacttttgcactgcaatgataagatgtttcactaaaaatagtacgaaaaccaaaatattcattagcgtgataaagtcgagtcaatgtttctttgccattttccagactatgatacagaccaactagcccttgttttaaaaaataaaattctttaggcttctcgccttgtgcataaattaagctgtttttttctagagttttactctcagaaataatacatttatttaagttttgtggtagataatagggcaatgtaaacataaaggcgtcttttaatatataaataactttagattactatacaaatttctatatttttctgctataagcaaattatgaaaatgtgaagtgtttaacaaaattttgaactagataaatattattttattttgccaaatgattttgcaaatgactttaaatatggagccatatgagaaagtgctgaataatatgcctcacaaagttgattatgtgctttaccaaatccttgaattgtacgatgttttggacatcctccgtgacatgcaaagcgaaacttacagattttacactgttcggaaagaaaagatttcgctgcaccaaaattcttttgtttagtattattatcaaggagctgtattagagggatttcaataagatttccgagtttatattcaggataaacataatgatcgcaactataaatatcgccattttgttcaataaccaattgatcgccgcaggtttcacgaaaaatacataaacttggttgtaaaccaaggtaagccataaaccattgttcaataaattgaataccaattttgccgatatcattggtataccattcatcaaaaatattaattaaaaattgaccgtagtcttttgctgtagcttgttgtttgtaatcgcccattagtggaataaattgcatataagatgaacctattcttttcaagaaatggtagatttctttagcatattgaacattaagattatgtactacagttagcgtattaaaagaaacttggtaattatagagtaaatcgagagcattcattacttgttgaaatgagcctttgccatttttagttaaacgataggtatcgtgtaagtgcttaggcccatctatagaaagtcctacaaggaagtgatgatcgtgaagaaaacggcaccaatcggcattaagtaataccccattcgtttgtagagaattttcaatttgtttgccattagcatatttatgctgaaaattgaccgctcttttgtagaaatcaagacctgctagggttggctcgccgccttgccataggaaagtaacttgttgttgaggtgttgtttcaatataggatttgatataggcttctaatacttcattagtcatagcccgttgatttaagtgaggtttttccaagtaaaagcaatattgacaatctaaattacaaattgaaccagtaggttttgccattaattgaaatgaattcatatctatgtatcctccttattctttttatcatagcagaataattttaactgtatatgatagcgatcataagttgcgcatatgctcttacgtcaaaatgaagtatgattaaatgaatttttaaataggatctaagatggcgtttagtacaatttttatcttactgatttgcggtatttgtaccaatatggtttctgctatttttggtattggcggtggggtattgatggtaccaattttacgtacattgtttcccgcgttaccgattcaagttatttcagctacatcacttaccgtagtgatgtgtactgcattgattaatttattatttttccataagcaaaaaattaaaattgattatatcaatatgattttatggtctattgctatggtgattggcgtgcaaattggttttgaattaagtttttatttttctacagcaataattagtttaatttttacggttagtttgagtgcactagcaattaaaacatttttaaacagatcgagaacgcaaatagaagtggctaatatgtctcctatagaacgagctaaaggcagtattagttgttgtggaggaggcttaattgcgggtattacaggtattggaggcggttctattcttgctccgcttgttggccaattaaagggggtaaaaacgcagcaaattgccgtttatacgaactacatgatgattattggtgggattggtaatttatatggctatctcacaagagtcttcccttatgatgtcagtctaagtggccaattaggatatgtaaattttcttgtagttggtgtcgttaccttgggttcatttgtaatgagtttcttctcaatgaaattgcgtggattaatgaatccggctttaacaagaaaattattggcgattattttattttgtattgcagcctatatgtgcattttggaatttgtattccattaaatcgaataaactagacctagttattctaggtctattctctaattagtgttttcgcaatctctcttgcttgtgcatcaatttcgagtacatcatcaatattttgaatggtataaggcgaaattttctcaattgttttcaaattaatttttgcaatatccataaaactaatttgacgatctaaaaatgcttgtacggcaatttcattagctgcattcattgctgttgtcgcatattgacccacagcgaaggcatcaatagccagttttaaattcggatagcgattaaaatcaggttcaataaatgtcagttctttgattttaaagaaatcgagtggttctactccagcaaaagtgcggtgaggatatgccatagtttctgcaattggtgtacgcatatctgggtttcccatttgagctatgactgagccatcaacataccgtaccatagaatggataatagattgtggatgaataatgacttccatttcttccgcacttgcgttgaaaagccagcgagcctcaatgtattccaagcccttattcatcattgtagctgaatcgacagagatttttttacccatagaccaattagggtgcgcaaccgcttgttctggtgttatgttggtgaattgttcaagtggcgtgtaacggaatggtccgccagaaccagtgagtataattttacttacacctaattcagaaagtgggcaaaaaccaattttttcttgtgcttctggcggtaatgattgaaagatagcattatgttcactatctactggtaaaagcttcgcgccatagttttttacagcatcaataaaaagctgtccgcaggttaccagtgattctttatttgccagtaatacccgtttacccgctttaaccgctgaaagagtcggtaacaatcctgcggcaccaacaatcgatgccattatctgatcggcatctgggtgtgcagcgagttcgcaaatagcttgttgtccggctaatacttccgttggagtatgatgcgcaattaatttttcacgtaaaattttagccgcatttacatcatcaagagccgcaaagtgcggtcggaatttgatacattgttcaaacattgtttctacattttttccgcctacgagtgcaaatgcatgatatttctgagggttattttcaataacagaaagggtactcttaccgattgatcccgttgaaccaagaatgacaatgttttgtttttgcatagaatctttaccgcactttgttgattatattttcattggtacgtctaaattcgcatacctaataaaataaaggcagacaaaactgtctgcctttcgtattttttgatgattagaaatccattaattctttttctttatccgctaatacttcatctacttttttaatgtaaatatctgtgattttttggatttcttcttctgctttatgttgttcgttttcgctgatttctttgtcttttaataatgctttgattttatcattcgcatcacgacgcacattacgaatcgcaactttaccttgttcaccttcgccttttacgatcttgattaaatcgcgacgacgttcttctgttaatggcggaagcggaacacggattgtggtacccgctgaagatgggtttaaacctaaatctgaggttaaaattgctttttctaccgcagagattaaagaacgatcaaaaacagttacggctaaagtacgcgcatcttctgccactacgtttgctaattggcgaagtggcgttgctgcaccgtaatattcaacttgaattgcatcaagtaaactcggttgagcacgaccagtacgaatttttgaaatatgaccttttaatgcttcaaggcttttttccatacgatcttgagcatcttttttaatttggttaagcattgcattgtcctttttaattgatgaaagttagaacgccgtgattttactggatttttttaaatttttgaatacatttatcagcttaaaaacagataaaaaatgaccgcacttcagttacccaaagtgcggttaatatttttagtatttttaattaagctttaggaccagctgcaattaaagctttgccttcttcgttagttgcatatttaacaaagtttttcacaaaacgacctgctaagtcttcagcttttgattgccattgtgctttatctgcgtaagtatcgcgaggatctaagattgcagaatctacacctggtaatgctttaggaatggctaagttgaagattggcaattcgcccatttcagctttttcaattgagccatctaagattgcatcaatgattccgcgagtatctttgattgagatacgtttgcctgtgccattccaaccagtatttactaagtaagcttcagcacctgctgcttgcatacgttttactaacacttctgcatattgagttggatgaagcgttaaaaatgctgcaccgaaacatgctgagaaagttggcgttggttcagtaataccacgttcagtccctgctaatttcgctgtgaaaccagataagaagtagtatttagtttgttctggtgtcaatttagatactggaggtaatacaccaaacgcatctgcagttaagaaaatcactttagttgcgtgacctgcacgagaaactggttttacaatgttatcgatgtgataaattgggtaagacacgcgagtattttctgtttttgaaccatcatcgaaatcaacagaaccatctgaacgaacaaccacgttttctaataatgcgtcgcgacggatagcgtggtaaatatctggttcattttcttctgaaagatgaatggttttcgcataacaaccaccttcaaagttaaagataccaacatcatcccaaccgtgttcatcgtcaccgattaattcacgttttggatccgttgaaagggttgttttacctgtgccagataagccgaagaagattgctacatcaccatctttaccaacgttagctgagcagtgcattgcaccaacacctttgagaggtaggaagtagttcatcattgagaacataccttttttcatttcgccgccgtaccaagtaccgccgattaattgaatgcgttcagtcaagttgaaagcaacaaagttttctgaatttaaaccttgttctttccagtttggattggttactttagaaccgttcattacaacgaaatctggttcaaaatttttgagttgttcttcagttgggcgaataaacatattttttacaaaatgtgcttgccacgctacttcagtgacaatacgtactgcaatacggtcgtgttcgctcgcaccacagaaannnnncattccattcattaattaattaatgaatgaatgnnnnnttattataatgggatgtcaatataaaaaaatgttaagtagatctcatttttaaacatttttttaagaactttacctctttttagtgatattgtgatatagagcaaaaatcccgacattgtgtcgggattgtttttaaactcttgttgattttaatttttcaatcgcttctttattaaagaagtagtgtgtgccacaacactcacattgcatatcaatactgcctttatgttcggctaatatttcgtcaatttcttcatcggagatgagcagtaatgcagaaccagaacgctcagcagagcagccacagaaaaattgtacatcttgtgctggataaagattgatggtttcttcgtgatataaacgatagagtaactcttctgcagggagaccaaataattcttcatcttttactgttgctgcgagcgtagttaaatgctcaaaatcttctggtgtaccagaaccatcaggcataatttgtaataacatacctgctgccactggcttgccttcatattctccagtacgaataattaattgagtttgaagctgttctgagcgtacaaaataatcttctaagcattctgtgatcgtgggtttatccaagctaattacaccttgatagcgttcgccttcttttggtgcaatagtaatgaccaatacgcctttaccaatcatattatgcagactcatattttcagtgatgttaccatccactcgagcaagggcgcggatttgttgttgatcattgccatttactaatgctaagcgtaatggaccatcgccttgaatttgtacggtgatattgccgtcaaattttagtgtggcagtgagtaaattggtcgccaccatcatttcacccaataaatcttgtactgctttaggatactgatgggtatttaatgtatcagtaaatgttttatttaagcgaacccattctccacgaactgcacgatgttggaaaagataacggtaaagtttgtcattgtcttgagtatagtcttgttgattggtcattgattattcctaattgagataaaaagtgcggtggttttttccgcactttttgtcttgatcgttttatttaagtgtttttgcttataaataggtggcacttagaggcttgtaaaatccaatgtgatctctaagttataatattaattaagcaaatcttgttttggcttctgcaatagcttcggcaacacgcaatggcgatacgccaccttttgcacaacgtttgtctaagcaagattggagagaaagaatctcgtaaacgtcatctcccactacttcactaaattggcggaattcagggatagtaagatcttctaatcctttgcctttctcgattgcataaaccactgtttcgcctacgatatgatgggaatctcggaaaggcacacctttcgagactaaataatctgctaattccgttgcgtttgaatagccttttaacgcagcttcacgagtacgttcaacatttactttcaattcatctaagacgaacgttgccatatccacacagttttgccaagtatctaaggcatcaaaaataccctctttgtcttcttgcatatctttattatacgcaagaggcaagccttttaatgtgattaacatagatgttaatgaaccaattactctacccgttttgccccgaattaactcacaagcatcaggatttttcttttgtggcattaatgatgaaccagaagtcacacgatcggatagttccacgaaatttgcttctccgctgttaaagataatcatatcttcagcaaagcgggaaagatgtgccatactaagagaggcgatagaaagtaattctacgatatgatcgcgatcagagacgctatctaagctatttctagttgcgaaagcaaaactaagatcgtgcgcaagtgaatcacgatctacagcataagccgtaccagccagcgcaccactaccaagtggacaagtattcatacgattatacgcatctgttaaacgtgaatagtcgcggtcgaacatttccacatatgccatacaccaatgggcaaaagttattggttgagctcgttgtaaatgggtgtagcccggcattactgcttgttgtgtgttttctgcggtttgaactaagtggcgttgcaaattacgcacggattcttgtaattcaaccacacgttgtttgcaccatagttttatatctactgccacttgatcgttacggctacgaccagtatgtaattttttaccaaggttgcctactttatcaattagcttactctcaacccaactatgaatatcttcagcatcatcttgtaaaattgcttgcggatttgaccgcacttcaacaagtaattcatttagtgcttgctcaagttgatgctgttcttcgatagttaatacattcactttcaccaaggctttggaccaaccaatcgagccttgaatatcctgttctgccaaacggtaatcaaaccgtaatgaatcattaaaatctttaaaacgcttatctgcggcttgtgtaaaacgcccaccccaaagtgccataatttttcctttttgttttaattaattattctattattgtgcatatttattcataaatcaatattctatattaataataaaacaaaaatggacaaaatctttcattttgtccattttatttgtattagtgctatttatagcgtttttgccaaatttttgataaaggatttaaattctttacctaatttttcgtgacgaataccatattctacgaaagcttccatataaccaattttatcgccacaatcaaaagtttcccctgtcatatgaaatgcttcaacggtttctttttcaattagcatatcaatagcatcggttaattggatttcatcgccaacaccaattggtgttttttctaacaaatcccaaattgctgctgaaaaaacataacgcccaaccacagcaagatttgatggtgcgtcttcaatagaaggtttttcaacaatactattaatttttgcactttcgccgccattaagctcaatgccaccacaatctgcaacaccatagctactcacattttcttgcggaactggggttaccataatttggcttgcgccagtttcattaaagcgttgaatcattgcagcaagattttcttttttctgatctgcactaaattcagctaataatacatctggtaacataacggcaaaagattcatttcctactaaaggacgaccgcataacacggcgtgacctaaacctttcgcattaccttgacgaacgtgcataatggttacattttttggacagatagaacgaacttcttctagaagctgacgcttcacacgtttttccagcatcgtttctaattcaaaagaggtatcaaaatggttttcgatagcattttttgatgaatgtgttaccagcacaatttcttttatgccagcagctacacattcatttaccacgtattgaattaacggtttatccaccaaagtgagcatttccttcggaatcgccttcgtggcgggcaacatacgtgtgccaagaccggcgacaggaataattgctttcatattatcatatccattgtttaactaagaggaacctaaatagggttcatctttcgtttgtttaattcgttggtaaatttcttctcggtgaacggatacttctttaggcgcttcaacaccgagtttaacttggtttccacgtacactcaaaaccgtgatagaaatatcatctccaataagtacactttcgccaactttacgagttaagattaacatcttttatctccttagtttgcatttattagatatcctatcaatcaaggaacggttggcattccaccaaccagcttgtactacagatttttgtttaaccagtcttgtgccactttaattgcttgtgccacattttctggttgggaacctcctgccattgccatatctggacgaccaccgccttttcctccaacttgttgagccattaaattaacaagttctccagcttttattttggcggttaaatcatttgtcactccaacgacgagattaactttttcatctaatattgatgcaaatgcaattacgcctgatccgagttgattttttaaatcatcgaccattacgcgtaatgattttgtttctataccatctaattgttgtgcaataacagaaacaccgttgattttgaccgcactttttacaaaatcagaaccagcctgcattgcggctttttcttttagagcttgtaattctttttccactttcttcgttttgtcttgaagttgttggattttttccactaaggtatttacgtctgattttaataagtctgcgctttgggtcagaatgcgttgttgattatgtaaccagtcaatggcattttgacctgttacagcttcaatacgacgaatgcctgcagccactgcgttttcagtaataattttaaataaaccaatatcgcctgtgcgttttgcgtgaataccgccacacagctcaattgagaaatcgcccatcgttaatacacgaaccttatcgccatatttttcgccaaagagagccattgctcctttcgcttttgcggaattaatatccataatatccgtttgaactggaaagttagcgcggattttttggtttactaatgtttcaatttcactcaattgctctttggtaatggcttctggttgcgcaaagtcaaaacgtaaggctttatctgaaacaagcgaacctttttgcacaacgtgtaaacctagaatttgacgtaaggcagcgtgcaataagtgtgtcgctgagtgattgagtgatgtgttgtggcgacgtttagcgtccacaatcgcattcactgattgtccaacttttaaacttccttgcgttaattccccaatgtgtccaaatacttgcccatatttttgggtatctttcacattaaaggttacaccttgtgcgcttaaatatccgctatcgccaatctgaccacctgattctgcataaaatggcgtattttctaaaataacgaccgcactttgacctgcttcgatactttccactgatttaccatcatagaaaagtgcggtaatttttgcctgagattctacttcagtatagccttcaaacttagtttcgccatctacacgaataacgctgttgtagtccacaccaaactggctcgctgcttgagcacgagtacgttgtgcttccatttcacggtcaaacgcttgttcatcaatagtaatgttacgctcacggcatacatcagccgttaaatccaatgggaaaccataagtatcataaagtttgaatgcaacttcacctgaaagaatgccatctttcacttgagaaagggcttcatctaataagctcaacccacgttctagagtgcgagcaaattgttcttcttctagacgtaatagtttttcaacatttgtttgttttgcttttacatcttttccagcttcagccattacatcaattagagttggcacgagtttatagaaaaaggattctttggcacctaataggtgaccgtgacgaactgcacggcgaataatacgacgtaagacataaccacgcccttcatttgatgggataacgccatcggcgattaaatatgcacaagaacgaatatggtcagcaataacacgtagtgatttgttagttaaatctgttgcgcctacaatttccgccgtttttgcgattaatgttttgaaaatatcaatctcgtagtttgagttcacatgttgcaacacagcagaaatacgctctaaacccatacctgtatcaacagacggacgaggtaatttttccattgtgccatcggctaaacggttgaactgcataaacacaacgttccagatttcaatataacggtcgccatcttcttctggtgagcctggaggcccgccccaaatatgatcgccgtgatcgtagaaaatttcagtacaaggaccgcaaggacctgtatcgcccattgcccagaagttgtctgatgcgtaaggtgcacctttattgtcaccaatgcgaataatgcgttcagcaggaacaccaacatctttattccaaatattataggcttcgtcgtcagtttcatacacggttacccagagtttttctttaggtaaaccaagccattgtggagaagttaaatattcccaagcaaaattaatggcatcctgtttaaagtaatcaccaaaactgaagttaccgagcatttcaaagaaagtatggtgacgtgcagtataaccaacattttctaagtcgttatgcttaccaccagcacgtacgcaacgttgcgcggtggtggctctagaataagggcgtttatccattccaaggaacacgtccttaaattggttcatcccagcgttcgtgaaaagcaaagtcggatcattttccggcacaagtgagctactctcaactacttggtggcctttgctatggaaaaaatcaaggaatgattgtcttatttctgctgttgttttcattaaaaagaatccttgttacccataataaaataaaaactaaatcgccctatttttgcatatttttgaaatttataaaaaggctttttgccaaaaccccaaaataaaaccgcacttcacgacgctatttgagaagtgcggttaaaatttaagttatttcagattattcaaaaaacaatttcttgttaattattcatctctaagtggaacaaccaacatatcaattttaatcgtattcatcacttgacgtgttgaagacattaacttactccaaaaatcctgatgatgtcccgtcactaataaatccacatcatattgttcgatggcatcacttaaaacttgtcctaaatcgccgctgccactcaatttttctgaaattggataatccacactttcagctaaatctaataaggctttttgtgtttccgtggaaatcctgtcttgcattgaagacatattcacatcaatcaatccagtataaagatccgaaaagttcacatcaacgtggatgatagaaagttttgcgtcgtggcgtttagcaatcccaactgcttttttaagtaaaactggactttcttcagaaagatctactgctactaaaatgtgtttgtacataatcgactccttaactgattggttcggtttttaactggnnnnncattccattcattaattaattaatgaatgaatgnnnnntattgctctggcacatcagcatcttctgaaatataaataccaggctcaacggtaattaccatgccgatttcgagtatccgttgtttatcttggccataactacccacatcatgcacatctaaacctagccagtgccctaatccgtgcatataaaattggcgataagcttgttgttcaataagtgtatccacatctcctttcaagatacctaaatccactaatccttgggttttaatacgaataacttcatcattggcttgcttaatggaattgccaggtacaagtaattcaatcgcacgtttttgtgcttttaaaactaactcgtaaatttcacgttgaggctggctaaattttccatttacaggaaaagtgcgggtgatatcgcctgcatacatggcaaattcacagccagcgtcaatcagcactaaatccccatcatttaatggacgatcattttctgtgtagtgcaaaatacaggcgttacttccccctgcaacaatggaattgtaagaaggaaatctggcgcaatggcgattaaattcatgcaaaatatcgctttcaatttcatattcaaagcgatttgggcgtgttgtttgcatcgctttaatatgcccaagtgccgtaatttgtcccgcttgttgtattaagcggatttcattcggcgattttataaggcgcatttcgctgagcattggtcgccaatctaaaatctcgctaaaattcaccgcactttctgacaccaatgtatcaccccaagtatgaatttctggcacatggtaaagtgcggtcaaatttttcagtatttttggcagtacggtagcgaattcttcaatagaataggcttcatttacattaagttgctgtggtgcacgctcaacacctaatcggcgaccattccacgtttcaagtaacggatcgcgtggacgaagaaaaataatggctttttctgcttgttctgttttcagtaataacagagcagcattcggttcattaaagcctgttaaataccaaaaatagctatcttgacggaaaggataggtacaatcattattacggcgtttttcgatttcagaaaaaagcaataatgctgaattaggttgcatttgagcgaatactcgtgtgcgacgttcctcaaattcttctttaggcaatttagccatataagtcaattccattcgagatctccttaatgtaatacaggtttgctctcaatttcttcttcgttgaaatgagaatagaacaacattgcaatggtgcgaacatattcaatgatttcttctagtgcttccgcaagctcttcttcattatcatcttcattataaccaagttggcaaatatcttgtaaatcatctaccgcttcgccaatttcgcctttttcttttgctaattcaggttgtgctaagccaagaccaagtaagaattggtttgcccagtcagataggctatccgcttgtgtaaagacattttcatcttcagttaaaccaagttcaaaggtaaagccttcaacatttgataaggtttgactaatttgttcataaagttctgtaacgggttggactaatcctgttggataagcgtgattatcattgctgaattgatataagagcggtagccaactttgatcttttaatccaccacaaagtaaaccgcttaaaaagccgtgtagttctgttgcattaaagccgattccagcagatttaagttgttggttaaggtcggaataagaaataagcataatagatttcctgagtaaatttgaaattagtgtaaacctttgtaaataaaaaagccattgcttgaccaattaaattagattaagaggctggtggtgtgtcacagcttttaacgctagaaatgaacctaatttatagatcttgtaatgacatttttattataaataatggcttatttaaatttaaactccgtccattgataatattgctcgcctgctttttgaatcccgccgtaattttgccattcaggatgattaggcgtgtcgggcaaacattgggtttctagtgctacgccagaaaaatcggcatataattcgccatttctcgttggtgtacctgcaagataattacccgtataaacctgcaatgcagcttgcgaggttcttacttccaaacttaaatcgccagttggagaggttagtaacacacaaggcttttgccaagctttattgacaataaaggaatgatcgtaaccctttgttgcttgctgatccccttgtaaaaaatcttgcttgatgggtttagcaatacggaagtcaaaactcgtattcactacgtgctttaatggagaattaggaatcccctcattatctacaggcagataaaaatcagcatttaaacgtaatgtatgttcacgcacgtcactgccttgctctgcattttctaaattgaaataggcatgattcgttaagttcaatgcagtatccttatcacaaatccctgcatattcaatttttacgctattatcatctgttagcgtataggttacagacacatccacattcccaggaaaaccctgatcgccatcctctgactgtaatgaaaaacacacaaaatttttaccgcacttttggattttccaacgacgtttatcaaaaccctctccaccatgaagctggtgctttccttgattactacttaatttaataagttcgccattcaattcaaattgtgcatttgcaatacgatttgcataacgccctacgcttgcgcctaaatagctttgatgagtggggtaattctctaccttacaacctaataaaacctcgcgtaatgtgtcatttactggcactttacaagaaagccaagttgcgccccaatccagaaattgaacacgcatcccattttcattttgcagggttataagctgataaggtgcaccatcaggcgcattaaaagtggtttgttgtaacatcattttctcttaaatcactcgcacaccttgtgatgcggtacactcataaaaagtttcttttaaaccagtcgttttctcgtaattatccgcaataattttacgaactgcatcgactttatcatgcggtgcaagtgcgacaatacagccaccaaaaccgccgcccgtcatacgtgcaccgccacttttgccaataacaagttgaaccaattcaactaaataatcaatttgtggcacggtaatttcaaaatcatcacgcattgaatcatgagattccctcattaactcacctaaacgggtcaaatcatttttcttcaatgcttccactgcatcgagtactcgttgattttctgttacgacatgacgagcgcgttttgctgctaacggagaaagtgcggtcaattccgcttctcttttttggaattgttcaaccgaaacatcacgtaatgcttttaccccaaaaaattttgccgcctcttcacattgctgacggcgagtattgtattcacccgttaccaaatcgtgcggtacgtttgaattcacaataatcacggcaacatcttgtggtacgggtgttggcgtggtttcaagactacgacaatcgatcatcagtaaatgattttcctgccccagcgcagaaattnnnnncattccattcattaattaattaatgaatgaatgnnnnntggttttcagccttttgcccattcaatgcaatatccgtatgagaaagtggtaaatcgccaagttgttggcagaatttacccaccgcaacttctaacgctgcagaagaacttaatcctgaagaaagcggcacattaccagaaatcactaaatttgcaccttgttgaaagtgcgggtaacgttcttggataaattttaccaccccacgcacgtaattggcccatttgtgttcactcttaagaatttcaacattgagagaaaattcatcagtttcatcaagatctgcagcataaacattccaaatatgatcatctcgttttgtaccagaaacggccgtaccaaaattaattgcgcaaggcataacaaagccgtcgttgtagtcggtatgttcgccgatgatatttactcggcctggcgcatagacggtaatttctggcaaatttttatgctgtctattgaaaatttgttgagcattttggattggggtcatatttctatcctttatattaaatctatactcgatctgcacccctctttgctaaagctaaagaggggaactgactatattatttagttctttctttataatgaacttcactcaaagcacgtaatcgatctgcagcctgttccgccgttaaatcgcgttggttttcgcctaacatttcataccccaccataaatttacgcacggttgctgaacgcaaaagaggagggtaaaaatgagcatgtagctgccaatgttcgttatcttcgccattaaatggtgccgcatgaaatcccattgaatatgggaaagaagtttcaaagagattgtcgtatttagtcgtcaattttttcaaaataaccgcaagatcttttgattgttcgtcacttaattcagttaaacgttttacatgagtttttggtaaaagcaatgtttcaaatggccaaacagcccaataaggcactaaagcgacccaatgttcagtttcaacgacaatacgttctttcaacgctaattctcgttttacataatcaaccaacattactgagccatgttttagcaaataatcacgttgtgtacgatcttcacgagcaacttcatttggcaagaaactattcgcccaaatttgaccatgtggatgtgggttagaacaccccattgccgcccctttgttttcaaaaatttgcacccattggtatttcgcaccaagttcacgaagttgttcctgccatactttaatcacttcttcaatctcaagtgcggtcaataatggcaatgttttactatgatcgggagagaaacaaatgactcgactttccccacgagcttgagaactttggaaaagaggatcggaggatttttcaggggctggcgtatcttctaaaagcgcggaaaaatcatttttaaacacataaggtttacgataatctggatttaattcccctgtaatacgcttattactcgggcaaagataacaagttggatcataacttggtttttgttcttcattgactttttccctgttgccccttgccacgggcgtttggcacgatgtggcgaaactaaaacccattgatcgattaacggattgtagcgacgatgtgatgttctgtagttcaaaaagtgcggtcattttgactcctgttttttatcaatgtaagcgattacattaatttatactaaattattgtaaataaaccgtgatctttgtcacaaaataagaaaataagcaaaattttttatgatttagttcatacttatgaaagtaaccgctttcaatttatcgtaaattatttatgatcaaaatataagatttatagattataacaaggaaaaagttatgagtactattcgagatgtcgctaaattagccaatgtatctgtcgctaccgtatcccgagtattaaatcactctctttctgttagtgaaaatacacgccttgcggtggaacaagctattgcacagttagcttatcaacctaatgcaaatgctcaagcccttgccgtgcagaacaccgatacaattggcgtggtggtaaccgatgtgacggatgccttttttgcaattttagtaaaagcggtggataaagtagcagaagcacatcaaaaaacgattcttatcggtattggttatcatcatgcggaaaaagagcgggaagcaattaataccttattacgtaagcgttgtagttctcttgttgtacattctaaagccttatctgatgatgaattaagccattatttaaatactgtgcaaggaatggtaatcattaaccgtgttattaaaggttatgaacatcgttgtgtcagtttagataaccaaaaaggcacttatttagccacggaaatgcttattcgttatgggcatcaacatattgcatatatcggttcaaatcacgccatttttgatgaagttgaaagaagaaatggttatcttgccgcattaaaagatcacaattatctcatcattgaacaggcgataacactcaatagcccagactttgaaggcggcgaaaaagcaatgattgatttacttagttataacaaaaatcttacggctgtcgttgcttataacgattcaatggcggcgggagccatttcagttctcaatgaaaacaatatcagcgtaccaagccaattttcaattattggttttgatgatatgccgattgcccgttatttgatcccaaaattaaccacaattcgctatcctattgatttaatggcaacttatgcggctaaattagcattaagtctaactgacgagaaaataattacacctccagtagttcaatttaaccctactttggtacgccgtttttcggtggaatcgcgctaatttgtgacatggatcacaaattcataattttttatgtaatcattttcatttttgcaaatttgctcatagattaattacgataatttatttatgatgtnnnnncattccattcattaattaattaatgaatgaatgnnnnntggggtaacgatttataaatatgatgataactttatgtctttaatgcgcaaagaaattgataaagaagctaaagtagtcggtggcattaaactcttaatgaatgactctcaaaatgcacaatctattcaaaatgaccaagttgatatcttactctctaaaggcgtgaaagcacttgcgattaacttggtggacccagcggcagctccaactattattggcaaggcaaaatcagataatattcctgtcgtattctttaacaaagaccctggtgcaaaagctatcggttcttatgaacaggcttactatgtaggtactgatccaaaagaatcaggcttaattcaaggggatttaattgcaaaacaatggaaagcgaatccagctcttgacttaaataaagatggcaaaatccaatttgtattattaaaaggcgaacctggtcatccagatgcggaagtgcgtacaaaatatgttgtagaagaacttaatgcgaaaggtatccaaactgaacaattatttattgatactggtatgtgggatgctgcaatggcgaaagataaagtagatgcttggttatctagctctaaagcgaacgacattgaagtcattatttctaacaacgatggtatggcattaggtgcgttagaagcaacaaaagcgcacggtaaaaaattacctatctttggtgtagatgcgttaccagaggcattacaattgattaataaaggcgaacttgcgggtacagtattaaacgatagtgtaaaccaaggtaaagcagttgttcaattatctaacaatttagcacaaggtaaatctgcaactgaaggtacaaaatgggaattaaaagatcgtgttgtacgcattccttatgttggtgtggataaagacaacttaggtgactttttaaaataattttccatcaatttttgttgtaatctaaggggaagtggatcttcccctttttaaagaggttggatatgacagctcaaactcaatgtcaagacagccaagtgctgctcacaatgaccaatgtctgcaagtcctttccaggcgtaaaagctttagataacgcaaacttaacggttcgatcacattctgttcatgccttaatgggcgagaacggcgcgggcaaatctacattactaaaatgtttattcggtatttatgccaaagatgaaggcgaaattcttttcttaggcgaacccgtcaatttcaaaacatctaaagaagcccttgaaaatggtatttcaatggtgcaccaagaactcaacctcgtgcgccaaactagcgtaatggataatttatggcttggacgctatccacttaaaggtccttttgttgatcacgccaaaatgtaccgtgatactaaagcgatttttgatgaattggatattgatgtagatccgaaagaaaaagtcgccaaactttcagtttctcaaatgcagatgatcgaaattgcgaaggcgttctcgtataacgctaaaatcgtaatcatggatgaaccaacatcctcgctttctgaaaaagaagttgagcatttgtttaaaattatcgacaaattaaaacaacgcggttgcggcattatttatatttctcacaaaatggatgaaatcttcaaaatctgtgatgaaattactattttacgcgacggtaaatggatcaacacggtaaacgtgaaagaatctacaatggaacaaattgttggaatgatggtagggcgtgaattaacacagcgtttccctgaaaaaaccaacgtgccaaaagaagttattttgcaggtggaaaatcttaccgctaaaaatcaaccatccattcaagacgtatcttttgaattacgcaaaggtgaaattctcggtattgcaggacttgtgggggctaaacgtaccgatatcgttgaagctatttttggcgtacgtgaattaatcgaaggaacgattaagttacacggaaaaactgtgaaaaatcataccgcacttgaagcgattaataatggctttgcattggttactgaagagcgtcgttcaacggggatttattctaatttaagtattgagtttaattcattgatttcaaatatgaaatcttatctcactccgtggaaattacttagcacgaagaagatgaaaagtgatacccagtgggtaattgattcaatgaatgttaaaacaccatcacacagaactacaattggttctctttctggtggtaaccaacaaaaagtcattattggtcgttggcttttaactcaacctgaaattttgatgctagatgagccgactcgtggtatcgatattggggcaaaatttgaaatttaccaacttattcaagaactcgctaaaaaagataaaggcattattatgatttcatcagaaatgccagaattactgggtgtgactgatcgcattttagtaatgagtaacggtaaattagcaggtatcgttgaaagcgcaaaaacatcgcaagaagaaattttgcaactcgcggcaaaatatttataaacataaggaatgaattatgagtgccttagaaaaaaacaaatcctttgatctcttaaaacaaaatgcgatttattttgtgttattgattttgctcggcatcatcattgcacaagatccgacattcttaaatttagtcaatttcagtaacatcttaacccaatcttctgtacgtttaattattgctttaggggttgcgggtttattgattacacaagggactgacttatctgcaggtcgtcaagtcggtttggctgcagttatctctgcaacaatgttgcaatcaatggaaaatattaaccgcgtgttccctgaaatgggacaaataccaattccagtggttattctcgcagtttgtgctatcggtgcagtaattggtttagtgaatggtttagttatcgcttacttaaatgtaactccattcatcgcaaccatgggtacaatgatcatcatatatggtttcaactcactatactatgatgctgtaggtggttctccaatcgcaggttttagtgaaaatttctcaacatttgctcaaggattcttccgagtcggcagttttaaactctcttatatcacgatttatgcagctattgcagcattattagtatggattatgtggaacaaaactcgtttcggtaaaaacgtctttgctattgggggtaacccagaagcagctaaagtatctggtgtaaacgttgcacgtaacttagttgcaatctatatgattgcaggtatgttctatgcctttggtggtatgcttgaagcgggtcgtatcggttctgcaactaacaacttaggttttatgtatgaattagatgctatcgccgcttgcgtagtgggtggtgtatcttttgctggtggggtaggtacagtaattggtgttatcactggggttattatctttactgttatcaactacggtttaacttacatcggtgtaaacccttactggcaatacatcattaaaggtagcattatcattctagcggtagccattgactcgttaaaatatgcgaagaaaaaataaagctgacgcaatcttaataaaatgaatgaaaagtgggcaaatttgtccacttttgttttatctattcaattctgaattaaggatatttatgcaataatcggcaaaccctgtataattgcgccaccattttcatagagagaaaaaaatgctaattaactttacacaagtattgcaagacagttggaatttcttccgtaatcagaaaaaaattatgctgcaatttgtcgcaattttatttattgtgcaaagcgcgagtgcacttttaagtttttcagttaatgatgaaaataaaaatgatgtattaaatctcgccaatacagatatcacaagttttatcttttcagttgcaatcactcaaattttaacgagctttattgcagcttggggattaacctcaatccataaaattagcctacaaaattatcgcactttaggtgaaaccttctcacttaccttgcgccgttttgcaggcgtaattctgttagatctattaatggttgcaccaatgttacttggtcttggtgaagcctttgctgcattactcacaaaaaaatcgccctctattatgtcacttatcgcgatgcttgttggcgtttggttctttgtccgtttaaatttaacggtagtacattatctttctactcaagaggcactttcgcaaactatccgaaaaatttggatgcgaggaaatactcgaaaaggcgtattgtttatttacaccctactggtttattttttcgtgccaattcttattttccaattaagcgcattttccaataatgctgtatttgatatggtaataggcattttcaccgcattacttaatattttcatgctagtagtgacttatcgtttctacagcttatttatgaaggattaatcaatatgaaacaactccttgactttatccctttaattttattttttatcacttacaaactcggtggtgtacgtgaagcagctatcgtattagtggttgcaacaattttgcagatcgtgattttaaaatggaaatacggaatagttgaaaaacaacaaaaaattatggcaagtgcggtcgttttttttggacttttaaccgcttactttaatgaaatccgctatttgcaatggaaagtgacaattatcaatggcttatttgctattgttttgctcgtcgcacaatttcaatttaaaaccccattaatcaaaaaattacttggtaaagagctacaattgcccgaaaaggcttggaatacacttaaccttggctgggcaatattctttattatttgtatgttggtaaatatttatatcagccataatatgtcggaagaggcttgggttgatttcaaatcttttggaattattggtatgacagtgattgcaaccattatttcgggagtttatatttatcgttatttgcctaaagatggctcaaattcaaaagacggagagaaataatgtctgccaattttactgataaaaatggtcgccaatcaaaaggagttcttttactacgaactttggcgatgccttctgacaccaatgctaacggagatatttttggtggctggattatgtctcaaatggatatgggcggcgcgattttagcgaaagaaatcgcacacggacgggtggttactgttgccgttgaaagtatgaattttatcaaaccaatctctgtgggcgatgtggtttgttgctacggtgaatgtctcaaagttgggcgttcttccattaaaattaaagtagaagtatgggtaaaaaaagtggcgagtgagccaattggcgaacgttattgtgtcaccgatgcggtatttacttttgttgcagttgataataatggtcgctctcgcacgattccccgtgaaaataaccaagagttagaaaaagcattagccttaatttcagaacaacccttgtaaataaaaggaaatcattatgtactatgttatttttgcccaagatattcccaatacgttagaaaagcgtcttgccgtacgcgagcaacacttggctcgtttaaaacaacttcaagcggaaaatcgcttactgacagcaggcccaaatcctgcaattgatgatgaaaatccgagtgaagctggttttacaggttcaactgttattgctcaatttgaaaatctacaagcggcaaaagactgggctgcacaagatccttatgtagaagctggcgtatatgcggatgttattgtaaagccgtttaaaaaagtcttttaatttaaataacgtaatatgaaaaaagtcgccttaatttctctttgtatttttaccgcactttctgcttttgccgatttgcctaatacggcaacagcatcaatcaatcttgagcaagaaaaacaaaactgggcgtcaatacagcatcaagactacttaaaacgtctaaaacaacgtgaagtctttttgcaagttgaaggtttgctaaaaagtgcggtaaaaaaccagcaattttctgaagcgactcaaaatatcacaaaaaccttaatagactcattgcaaggctaccctttgcaatatgatctgcttgctcgattttgggagacaaaaatcgccttttttcagaatgatgatattcaaggaagacaacaagcaataaatgaactcaatgcgttagtgcaacaaaattacccttttgtgacgccagcatttcaagccttattacaaaaactatccacgttaaacgaacaacaaacatcagcaacttcagataatgctaaagaaaataacagggttcaaaaagaacaaaatcaagtagaaaatcctaaacaacttgctgaaattgtaagaaaaagtgatcctaacactttagataaaaccgtattaattgatgcttttccacgttatcttaaaacgctacctgaacaaataaaataacctaagttttgaatcctatcaaaaatgggcaaatacttggcagctctcagaagatgaaatcaaacagtggaaaatcgcctttttaaatcgcttttttgataatgaaaacactgattttcaaaaatggcgtgatgaacaaatccgacaattacagactgataatttaaccgaacgccgtttacgaatggcgatttggcaaaaaactgaattaacctcttggctaaatttgctttctgccgaatcaaaaagtaagcaagaatggcgttattgggaagcgaaacaagatatattaaaaaataccaaaaaactgaccgcactttcaaaagagcgtggcttttatccaatgttagcggctacacaattaaaacaagcatatcaactgaatgtccctattgcgccaagttttactcaagctgaacaacttccttttaagcaagtttttgcaatgattacagaattaagagaacttggacgaaatggtttagcaaaacaacgttggcgaattttacttgataatgttgattttacaactcagctaaaactttctgaatatgccaaaaatcagcaatggtttgaattagctgttgatgcttctattgtagcaaaagcgtgggattacctgtctcttcgtctgccaaatgcttattctgaatacttcaatgctgcattacagaatttgaatatgagcaaaacttttgctatggcaatcgctcgtcaagaaagtgcttggaatctaatggcacaatcttcagcaaatgcgcggggcttaatgcagcttttgccaagtacggcaaaattgactgcagagaataatcaactaccttatcaaggcgaacaagatttattcaaaccattgaataatattttgctaggtaccgcacagcttaatgaactcaatggaaaatatcctaataatcgaatattgattgcagccgcttataatgcaggggcaaatcgagtagaaaaatggttaagtcgtgcgagtggaaaattagcattagatgaatttgttgcatctattcctttttatgaaactcgtggttatgtgcaaaatgtagtcgcttatgatttttactatcaaattttgcaaaataaagaaaacccacaaatttttagccaagaagaattgaatcggctatactaaatgcactagtttaatagtgtaaaatgggagcataattatgtatatcagccgtaatttagaacaatggaatgcatttcttcaaatgctaaaaatcgcctttgaagaaaacaaagcacaggaatttctaaccttattattaacagcagacgaacgagatgctgtaggattacgcttgcagattgtctctcagctgattgataaaaatatgcctcagcgtgaaattcaacaaaatctgaatacaagtgccgccacaatcactcgaggttccaatatgattaaaacgatggatcctgattttatgcaatggatgaaacaacatcttgatctcattgaaaaaaactaagcgaatttttaccgcactttctcacttatttagtcctaaatggtggaaaaaaaactggcagcgagttgtcttttgtttttttttcgccgtttttgctttgttgctgatttttcgctttgtacctattccattttccgcttatatggtacaacaaaaaatcgctaatcttttacaaggtgattttcgatatcaaattcaatatgactgggttagcctagaaaatatctctccaaacattcaattagctgtgatttcatcagaagatcagcgttttcttgaacatttaggctttgattttgaggctatccaacgagcaattcggtataacgaaaaatctaacaaaggaatccgaggggcatcaactatttcccagcaaactgctaaaaacttaatgctttggcacggacaaaattggctaagaaaaggtttagaagttccagcaactatgctactcgagctgacttggtcaaaaaaacgtattttagaagtgtatttaaatattgcggaatttggaaacggaatctttggtgtggaagcggcaagtcgctattactttaaaaaatcagctaaaaatttatctcaaaatgaagccgcacttttagctgctgtgttgcctaatccaatcatttataaagtaaataagccaagcttattagttcgtaaaaaacaaacttggattttgggacaaatgggaaatttaggcactgaatacttgagcgatttataaaaaatgcaatcgaatttctaaagtaaaacaaactaaaaaatatttacttaatatataaaataaaaaacgagtctaaaactcgtttttttatttataacatttttattacaggtttattaccgcaaataatacccaaacggtataaattgtggctaaaccgtaaaagataaatccaccagctggcacatgtactttaagatcgtgcataccgtgatgaatacggtgtaaaccacaccacattgggaaaatagtaagcactaaaataactaatttaccaatccaagaataagcaaaagtaattaaattatgcgcatcgactaaaccaaatggtaataacaaaccgatgattagaataacgacaggaaggaaaattgcactcactgtgccgccagcaccgaacattaaccatactggcggttcgccggagcgttttggattttgatcaaccattttttctctcccttaaatataaactaaagctaacgcaatcacgctaactaatgcggttaccgcccaaagtgcatttcttacaactgtgtgtggtaagcgttcatttttcacaatgatattcatcacttttggagtcattaagaaatatgtcaccgtatgataaagcgttgcgataagcgtaataatatttaagaacactacaatagggtttcttaaaaactcaataaagctcaagatgcctaagcctggcattggattgcttgcaaggcaaagaacaccataaagcaatacaatacaaaaccatacagcaaagactgaagtcgcttcacgtagcatataagctttgtagaagtccaatttttgccaccaagtcgctgtcattggacgaacatattttttacgtttactcactgttactgacattccttcccccttagccttttggttttagcatagagataacataatctttggcgctttccactttgccttggttaattgcagaagcaggatccacatgttttggacaaacttctgagcaatagccaacgaaagtacaactccaaaccccgtttttaccatttaataatgacatacgttttgctttaccatggtcacggttatcaagattataacgatgagccatcgtaatagctgcaggacctaagaattcaggatttaaaccaaattgagggcaagcggcatagcataaaccacagttgatacacattgagaattgacgatatttctcaagctgtgctggtgtttgtttagtacggcttacttgtaattctttcgatggatgtggtttaccatctaatgctggtgcttcgttaccaataatataaggcttaattgcctctaaactttcgataaagtggcttaaatcaaccactaaatcgcgttcaatagggaagtttgctaatggctcgatacgcatatggccgctgtaatcacgtaagaaagttttacaagccaattttggtttgttatttaccatcatcccgcaagaaccgcagatcgccatacggcaagaccaacgataagaaagagagggttcaagtttatccttaatatagcctaacgcatcaagcaatgaagtttgattatcataaggtacttgataggtgcttaaatgtggctcttgatcgatttcaggattgtagcgtaatacttcaacattcattactggtgaattagccatttgcttgctccttagctttcgcagctgcttcttgagcttctgcttccgcaccgtaaacacgttttgcaggttgagatttagtaattttcaccggactgtattcaatgcgcggcgcaccattctcattgtagaaagcaagtgtgtgttttaaataattgacatcgtcacgttctgtgtaatctaagcgttggtgagcaccacgagattctttacgttcaatcgctgaatttgcaatagattgcgcaacatctagaatgtaacccaactcaacggtgtaaagtacatctgtattgaacacgcttgaattatctgatacgcgaatacgtttgtaacgttcttttaactctgcaattttatctactgctttttgcatacttgcttggtcacggtaaataccacaaccttcttccatcacggtacccatttcatcacggatttcagaccaagattcattaccttcttgtttgtgaagagcttctaggcgagcaacaacatcttttgcttgagcatcaactgcactttgatttaccgattgagcctcaactgcacgttgtgctgcgtattccccagcaacgcgacctaacacaacaagttcagctaaagagttagatcctaaacggtttgcgccgtgtaaacctgaagatgcgcattctcctacagcaaataaacctttgatacgtgtttcgctgttaaaatcaacttcaatgccgcccattgtatagtgaacaactggacgaactggaattggttcatttactggatttacaccttcataagcacttgctaattcacaaatgaatggtagacgctcatgtaaatatttttcaccaagatgacgtaaatctaaatgcaccacatctacgcctttcgcggtttttaaggtattaccttttttccattcttgccagaatgcttgagaaactttatcacgagggccaagttccatatatttattttgcggtttgccaattggtgtttcaggacctagaccgtaatcttgaagatagcgatagccatctttattcactaagataccgccttcgccacgacaaccttcggtcattaaaatacccgtattaggtaagcctgttggatgatattgaacaaactccatatcacgaagtggtacaccgtgacgatatgccatagataagccgtcacctgttacaatgccgccattggtattaaatttaaatgcacgacaaccaccaccagttgcaataacaaccgcattggcattaatttgaacaagtgatccttccatcatattcattgcaaccataccacgagcatggccatcatcaacaagaatatctaatacgaagtgttcatcaaaacgttggatttgtggatattgaatagaagtttggaaaagcgtgtgtaataagtggaaacctgttttatctgcagcgaaccaagtgcgctcaattttcattccaccgaaacgacgtacgtttacatcgccatcagctttacggctccaagggcatccccaacgttctaactgggtcatttccactggtgaatgttgcacgaaatattccactacatcttgctcacaaagccagtccccaccagcaacggtatcttggaagtgtttatcgtaagaatcttcttctttgataactgccgctgcaccaccttctgctgctacagtatggctacgcatcgggtatactttagaaactaatgcaatttttaagttaggatttgcttctgctgcggcaatcgctgcacgtaaaccaccgccaccagcaccaacaatcgcaatatcgacattaactgtttgcacgatatcctccaatcaatagaaagtaaaaataaatcccctaaaagggtaatattgtgtgggcattgtgccattttttgttacaaattaataacgttttttatgtctaaagatggaaaagatcgtattttgtgatctacctcaaaaaagctaagattgagttgagagtagctctcgtttacaatgtgcaaaatttttaaaacaggattaaaaatgaccgcacttaatcattggcaaccttctgccgatataaaaaatcttcttaaacgggcaaaaattattgctgaaattcgtcaattttttacagaacgcggtttgcttgaagtagagacccctgttctaagtgaatttggcgtcactgatttacatctttccacctttagcacggaatttcttgcgcctttcggtgaacaatccaaaacactttggctttctacaagccctgaatatcatatgaaacgcttgcttgctgcaggcagtgggccgatattccaaatcagtaaagtgtttcgcaatgaagaagctggaaatcgccataatccagaattcactatgttggaatggtatcgaccgcactttcatatgcatcgtttaattaatgaagtagatgatttgctccaacaaattttagattgtccacctgcagaaagtttaagttaccaatttgttttccaagaatatgtaggcttagatcccttgtcagcagaacgttcagaattaattgaagcagcacgtaaacataattttatggctgaagataatgaagatcgcgatacgttattacagtttttatttagtgaagtcgttgagcctcaaattggaaaagaacgacctattgccgtgtatcatttcccttcaacacaagcagctctagcacaagtaagcccagaagatcagcgggtagcagaacgctttgagttctattataaaggtttagaattagccaatggttttcacgaacttgccgatgcgcaagaacaacgtcatcgctttgaattagataatcaacaaagacaaaaatgtgaattgcctactcgagaaattgatgaacgctttcttgctgccttagaagcgggtatgccagatgcttcaggtgtcgcattaggaatagatcgtttaatgatgatcgctttagattgtgaaaaaattaatgacgtcatttcttttgctatggacaatgcttaaaggtaaaagtgcggtaaaaattgtcatcatttttatttaatgggtgatccataatggcaattttatatttattgatagcccgcctaatatttctttttgataattaacaatattcgcttcttttaagggggaataaattctgagatcgaaattaggtacagcgatcacaaggctcatcattatgaaaaaaagaaaaccaaaacataagaaatgtttggatagtgagttgatttaaattgaaaaaataacctaatttcataaaaattaggtaactaaagcgtatccttttccgcgtaaagttttaaaccaagagggcttgttttttcgttctggtaatttgcgtcttaaattagagatgtgcatatcaagagcacggtcaaatggagtgagtggtttttccattacttctaaacttaattcttctcgacttaccacatttcccttagatttaagcaataaacaaagaatcttaaattcataatccgttaaatttagattttcttcattataggttgcaattccgtgagaaaagtggagagtaattccgtcaaaagaaaggatttctacatttgatatattatttgaaggagatgcactacgacgcaaaatcgccttaattcttgcaataagctcacgatcgttaaaaggcttgggtaaacaatcatccgctcccaattctaagcctaatacgcgatcaatgtcttcgcctcttgctgttagcatcatcactggcacgttagagactttacgaatttcttttaatgtttcgataccatttaactttggcatcattacatcaagtaaaaccagtttatagctttcattgagtttttgtaatgcttctaatccattatttgcagtttcaacgtcaaaaccctcaagttctaaaagtgtagaaagtagttcagttaattcaatatcatcatcaacgagtaagagttttgacattggagattccttttaccaattattcttattgtagtgcggtgaaaataaaaagattatttccagaatttccaccagcttgattttggtttctcacctgtttcaataatggtgttattttcgccttgttgtgaaacctgtggtaaaggtttatcaagatgggtttctgtcacaatcccacgttgatcaaattttactgtgaaagtatgttgaactggcgtttcataggcacgttgttgtaagaatacgtagtaccaagtgtagttattataagggtcgattaatattggtgttcccaacaaatattgtacttgttgagaagtcatgccttctttaacttgcgcaacggtagtcgcctctaaatagttgccttgcggtacatcaattcgatatacaactttttcaacggtggaacaagaagcgaggcttaatgctaaaaaggttgcgcctaaaagtgttttaacttgcattttctttaccttaatttgtgcaaaagttctgtcaaataatatccaaaattgggtgtatttccaaattaattctctgattttaaagccttttgtaattgatcttttaaatttggcggtaagcctttgatggttagggtatctgtcataggatcccattgaatacgtgtattcaataattccgcatcaaaacttagggtaacgccctttcctgacccagagaattttgttagcgatttcaatgttgaacgtattggtggaatactctcttccaaaccataattctgttcttccgtaaagacgacaaaaggctgttcgtttagagtgggtaatgaatcagaaagttcccttaattcaatattgttaccatttgaaagctgacctttacaatattcaaacacttgtttttttaccgcttgagtttgctctttgttgagttcgccttgatcgcagtaatcactcacagcttgcaataaacattgattttgaacttgtggatttaatccttcttcggcacctaaaaaatccataaaaaaatcactaattttgcgaccaacacggccttttataaaggttaaataacgattagagttcgcgtttacttgcaaatccgtcaaatttatccgtgccgcaatatcaaactgagtaatatccaaatattctgtacggcgaatatctaaatgctcatcgactaacatactatgacggctatcaagcaatgcaataaacaaataatctgtcgctaagaaattatattgacataaaatcaaggtgccactttccgcaaagttatatttacctagctcatctgcaagcaattttgttgaatattgactaaaacccaaaaactcaatttcttgctctaataaacgatttaaatgttgtgcaaatatagacttttcctgaaacacgccaaaagccttcgctttattttgatagccttgatgcaattgcaacatcatttgttctacttctggtgtaatggacagcaactcgtcgcgtaatacgctttccatttttatactgtcgccatccacatttttgactaactgatgcaaaacaatttgattaacggtaatactcatttttgtcacctttgaaaaatttgccgcaaattataaccgcactttttaagcaagaaaaaagaaattatttaggttctaccaaataatcgggtatcataagccaaatttttttatttttaacattatggctcaacattctaaatattctgatgctcaattaagtgcgattgtaaacgatatgatcgcagtattagaaaaacataaagcccctgtagatctttcgttaatcgcactgggtaacatggcgagtaatttattaaccaccagcgtgccacaaactcaacgtgaggcattagctcaagcattttcgaattccttaattaatgcggtaaaaacacgttaatatgaaatggattaaaaaaggcaccttcagcggcaaacaataccgcgatgacgtttcacgaaaaatttcgtggggtcattggtttgccttttttaatattattgttgctatttttattggcgcacgttatgcctttatcattgactggccagatactctcgcaggaaaactttatttctttgtgagtttgctcgggcatttcagtttcaatgtttttgcgttgtacttactcgtggtctttcctctgagtttcattgttaaaaatcaccgcacttttcgcggattaaccgtgattttttccacgatttgtacaaccttattgttatttgataccgccgttttcaatcgttttaatctgcatttatcctctgttgtatggaatttgctggtcaatccagaaaatggtgaaatgtcacgcgattggcaaattttctttgcaccaatgccaataattttactggcacaaatgttattttctcgctggagttgggaaaaattacgtagtcttgaacgccaaaaatggctaaaaggcactggtatattcttaaccacaacattcatcgcgacgcatttaatttatgcttgggcagatgcttatttgtatcgtccgatcaccatgcaacgctctaatttccctttatcttatccaatgacagctcgttcttttttagaaaaacacggtttcttggatggggaagaatatacgcaaaaattggcgcaagaaggtcgtttagatgccttaaaaattgattatccgaaaaaagaactcacttatgcaccaattacgcacaaacctaatattctgctcgtaacggtttcgggtttacgccatgatgcgatttctaatgaaaagatgccaaaacttgctaaatttgcaacaagctcaacggaattcactaatcattacagcacaggcaatagtaataacgcaggcttaattgggttattttacgggctaaatgcaaattacaccgatagcattttaagcaatcatacccaatctgttttaatcgaaaaattacgtgctgaaaattatcaattgggtttattttctgctacgaatttcaaagatagcatcttccgccaagcattatttcgtgaaataaaactttcatcgaataaaaccaacaaaccaaataatgaaagtgcggtaaaaaatctcaatgattttattaaagcacaaaaaactgactcaccctggtttgcttatttggatttagccttggaggctaaaaatccatcagattatgaccgcactttgcaagacattgattctcttttagcaaaagcgttagaaagtacaccgcttgaaaatacattagtcatcatcacgtcagagcatggtttaacctttaatgaaatgaatcaaaaagagcgagaaaactactttgggcgtgatgaaattcaagtgccattgcttgtatattggaaagatttacccgtaggtaaacaaaatggattaagtaatcatgcggatattttctctgcattaatgcagacagtattccgtgtagaaaacccgttgatggattatagtcagggacgtaatctctttgagcttaagggcgatgactgggtacttgcctcgaatttccgctggaatgtggtgattcaacctgatggaacacaatatcacattgatcgcaaaggtaattacaaaaaattcgataaagattatatcgagcaatcttcagacagaccgccacttggaatcttcttagaagccttccaattacaaaatttcttctttgaaaaataatctataagtgcacaaaagaatggattttttgcccttaagtctttatactcacgcctcagtttaagactgaaaaatgttattaatgaaaatccgtgagtttttcataacattatcataatgcttctcgccgtacttacagtacctttcaattaatatacattctcgtctttttatcctttcttttttacggagtttgtatgaaaagccatgttcgtagttttaaaacctatattcgcgatgaaattatcaaaaaaggcgggtgggtaaatgcccatgctcatgctgaccgcgcttttacgatgacgccagagaaaattgggatttatcatagtagtaacttgcaacaaaaatgggatttagtggatgaagtaaaacgcacttccagtgttgatgattattacgcacgtttttgccaatctattgaattaatgatatcccaaggtgtaaccgcatttggtacttttgtcgatatagacccaatttgtgaagatcgtgcaattattgccgcacacaaagcccgcgaagtgtataaacatgacattattttgaaatttgccaatcaaactttaaaaggggtaatcgaacccactgcgcgtaaatggtttgatattggtgcagaaatggtagatatgattggcggcttaccatatcgtgatgaattggattatggacgtggcttagaagctatggatatcttgttagataaggccaaatctcttggaattatgtgtcatgtacatgtagaccaattcaacaatccaagtgaaaaagaaaccgagcaactttgcgacaaaaccattgaacacggaatggaggggcgagttgtaggtatccatggtatttccattggctcacattcaaaagaatatcgctacaaactttacgaaaaaatgcgtaaagccaaaatgatgatgatagcctgtccgatggcatggattgacagtaatcgcaaagaagatcttatgccattccacaatgcgctcacgccagcagatgaaatgattcccgaaggtatcactgttgccctaggcacagataatatttgtgattacatggttcctctatgtgaaggcgatttatggcaagaattaagcctattagctgcgggctgccgtttccctcacttagatgaaatggtcaatatcgcaagtattaacggtcgtaaagtgttaggactagagctaatttagttgcgtatggtgggtttaagccagctagttaccataactattttaaaacccagaaaaacgcgtaaaagtgaaagaattgattgcgatatttggtgctcgtaaataataaaaataaaccgcacttttgttagtgttcggttagatgactgttttctttaaatcatctagcgtattaaaattctcgaagttgccttcttcttgcgtgaattttactgaaatcccgccattttctttcataaattgtaaaaggcgtcgttcacccgatgctaaatagtgtcgcaatttttcctttagctgaacggacattaaacaaaaaacgggatgttcacgttcttcatcgcaagcatacgcaattaaagtgcggtcatttttaaccgcacttttgagtttatctaaaagattcataggaaaaaaaggcgtatcacaaggtgtaaaaaggataaagtcactttttgtcttttctagagctgttagcatgccacttaatggcccttgaaaatcgggcagttcatcggagaaaacaggaaagccaaattttgcatattctgtttgatttcggttagcgttaattgaaatctgatgaatttgtggttgtaagcgattaataacatgttcaattaaagattgtttacctaaaatctgtaatcctttatcttgcccgcccattctacgagccttgccacctgccaaaattaccgagcttattgtaattgtcatattttaatctatcattatttcaagtatcatttgcctattttttacgattaaaaaggaaatagcaatgaaatgtaagcgtttaaatgaagttttggaacttttacagttttattggtctaaagactcggatttgagtttaatggaaattttgcaaaaaattgccaatgaatcaggtttccaaaaaccattaaatgaattaactgatgaagtgattatttatcagttaaaaatggatggtacagataaatatgagccaattcctggtctcaaaaaagattacgaagaagattttaaaaccgcattgctccgtgctcgcggtatcattaaataagaggaaagaaatgaaaaaagtattacttgcgttaggtttaggtgtcagcacgcttatgtctgtaaatagttttgccgcagatttacaagaaggcaaacaatatgttcaagtgagtcaacaggcttcacagcaaaaagaagtgattgagtttttctcattctattgcccgcactgttacgcttttgaaatggaatacaaaattccacaacaagtcgtagattctttaccaaaagatgtgaaatttaaacaatatcatgtaaatttcttaggtcatcaatctgaaaacttaacacgtgcttgggcgttagcaatggcattaggtgcagaaagtaaagtaaaatcaccattatttgaagcggctcaaaaggatgccttgaaatcaatggatgatattcgagctattttcttatcgaatggcataaccgccgagcaatttgatggtggcattaatagttttgccgtgaatggtttggtgaataaacaagtgaatgcagcagaacaatttaaagtgcgtggcgtacctgatttttatgtaaatggaaaattccgcgtaaaccctgaaggtttaaattacgatgatttcgtgaaagattatgtacaaaccgtaaaaggtttattgcaaaaataacgaaaaattggtttaatgcctgccctattttgtaaatattaatgaaagaagagagaatattatggctgcaagttttagcgtaacgcgtcgtttctttgacgacaaaaactacccacgtggtttttcccgtcacggtgattacacaattaaagaatcacaggtgcttgagcaatatggtcaagcgttcaaagcattagacttaggggaacgtgagccagcgactaaagaagaaaaagatttcgtcgcattttgccgtggtgatcgcgcagcagagactttctttgaaaaaacttggaataaatatcgtactcgtattaacactaaaaaacgtgtttacaccttatctagtgatgtgagtgaagttgcctctggcggtgaagattattccggcgaataagatacgttaaataaggcaggcggaagtctgccttttgtttttgaatagcttgtgaaatcacgcgtaattcacggctgataactttattctcctatctttgtatgaacgattcgtcttcatacaccctatgaatactaatttctatgcaattaccgatttctcaatacaacgaactgctacaaaaaaaacttgaaaaattaaccgcacttttacacccttttaatgcacccgatattcaagtttttgactctccaacaagtcattatcgcatgcgtgcggagtttcgtatttggcacgaacaagatgatttttaccatattatgtttgatcaagcgacgttgcagcgttatcgcgtggatgaatttccaatcgccagcatgctaattaatcgtatgatgcaaaccttattacctttgttaaaacaacaagaagtgctacacaaaaaattattccaaattgattaccttagcaccttgagtaataagattattgtgagcttgctttatcataaaacactcactgaggaatgggaaagtgcggctaaaaatttgaaagatttactcgaaaagcaagattttgatgtgcaaataatcgggcgtgcaagtaaacaaaaaatctgttttgagcaagattatgtggacgaagttttacctgtgaatggcagaaattatgtctatcgccaagtcgagaatagttttacccagccaaacgcaacggtaaactgcaaaatgcttgaatgggcaattgattgtacccaaaatagcgaaggtgatttattagaactttactgcggaaacggtaatttttctatcgcacttgcacaaaatttccgtaaggtattggcaacagaaatcgccaaaccttctgtagccgccgcacaatttaatattgctgaaaataaagtggataatttacaaattatccgtatgtcggcagaggaatttacgcaggcaatgaatggggttagagcctttaaccgcttgaaaggaattgatttaaaatcttatgaatgtaataccatttttgtcgatccacctcgcgcggggcttgatcctgatacagtgaaacttgtacaaaattacgatcgcattttgtatatttcctgtaatccacatacgcagtgtgataatcttgttgaactttcaaaaacgcaccgcattgaaaaagcggcgttatttgaccaattcccttacactgatcacatggaaagcggcgtatggctcattcgcaagtaggtattcagctgatttctgaatcgacagaaaaaacattagcagaattgaccgcactttgtgctgaacacaacattattcatgatgaacaaagtccacttgcgcttgttcaaatcgatgaacgtttagagcttcgtaaattagacgaacctaaactcggggctgtttatgttgattttgttggtggcacaatggctcaccgtcgtaaattcggtggtggacgtggagaagccgtagcgaaagcagtagggattaaaggttcggcattgccaacggttattgatgcaacagctggtctaggacgtgatgcctttgtgttagccgcagttggctgccaagttcgtttagtagaacgccatcctgttgtttttttacttctgcaagatggtttaaatcgtgcttatcaagatgaggaaatcggcgagatgttgcaacaaaatttgcgcttgctgaatgttcagcatattaatgaacttgatcctaatagcgattatgccgatgtggtttatctcgatccaatgtatccgcataaacaaaaatctgcactagtaaaaaaggaaatgcgagtattccagcatttagtcggggctgatgtagatgctgatgaattgcttttacctgcactacaattagctaaaaaacgtgtggtcgtgaagcgtcctgactatgcggaatttctttgtggaaaacaaccgcactttagccgtgaaacgaaaaatcatcgctttgatatttatatgggagcatcccaatgctaagagaaagtgccgttgttattagctatgaaaatggcattgccaaagtgaaatgccaatcccaaagtgcctgtggccaatgcgcagctaaaaacagttgtggaacatcaagcctttccgaattaaacggtaaacgtggcgagcatatttttaatgtggaaacattaatgccattacgcgaaggtcaaattgttgaaattggattagaagaaaagtcgatgttgttatccgcattattgatgtatgttgtaccgcttttgaccttattgattgtgactatgttgtccgattacataagcgataatgaaattctgcgtgccattttaatctttggattaaccgcactttctttcatatttgtaaaatcttatagcagaaaattaggacaacaaacagaatttcagcctgttttattgcgtgtattatcttgagttttttattcgctttttattattactgcgatctagatcgcaaactataaagctagttatttaaattacccattgaaaaaagctctttagaggcttggtcaaaacttagtgatgatgtggcaaaagttgctattctagcaatgcctgttatactttatggcgagcaaccgcttttcctaaaaggataaaatattagttttttgctcattattgcttatgcttgccttgtgatggggcgtaaatttcgtcaattagtggagggaaaataatatgtggcttactatagggcttggcattgtttcgcttcttgctattggcggacttatttttgccaattatgtagcaaaacattcttaatttattaaccccgatctttcggggttttccgtatctaaagtgcggtgatttttaaggttatttttatgaacaatcagattcctttacttggaattaccggttatagcggtagtggtaaaacaacattattagaaaaacttattccagaacttatcgctcgtcacattcgcgtttcagtgattaaacatagccatcacaatatgcaagttgataaagaaggaaaagatagttggcgtatgaaagaggcgggttcttctcaagtcattttagcgaatgatgaacgctgggcgattatgacggaaacgtcaaagcctgtttcattggattatttagcgcaacaatttgaccgcactttaacggatttagtgttggtggaaggctttaaacaagagccaattccaaagattttgctccatcgtcaagaaatgacaaaacctttacccgaaattgacgaatatgtgctcgcagttgcaacgaattatccccttgaaattgaccgcactttgttggatattaaccgcattccgcaaattgccgattttattgaaaattggttgcaccattttcacggagcacgatgactactgaatccaatgcctatcgcggtttagcttgggtagcagcaatggcactttttatgcaaagcctcgatgcgaccattctaaatacagctttacccgcgatatcttccgatttacataaacccgcctttgaaatgcaaatggcgatcatcgcttattctttagctgttgcattatttattcctcttaccgcttgggctgcggcaaaatttgggacattgaccgtttttcgtagtgcagttttcacgtttattttaggttcagttgcttgtgccgcggcctctaatttagagagccttattttagcccgagtgattcaggggataggcggtgcctttatgatgccggtggcgcgtttagctattattcaagctgtccccaaacaacaattagtgaatgcttggaatttaatggcaactgcaggtttgattgggccaattctagggcctattttaggtggatggttagtcattcacgccagttggcactggatttttttaattaatattccaattggtgcgctaggaattttggcatcgggcagcgtgatgaacaatatcaagggcgaggcagagaaattagattggacaggttttttactctttgcattagggttagttggtattacgcttggtttggatttactcggagaaagtcagcataattcaagtgtaacttatagcatattagttgttggtattctgttactcgtaacttattgtggctatgctaaaaacaatgaaaatgccattttacctttatcccttttccgaactcgtacattcagattaggtattattgccaatatttttatccgattatctgcatctggcgttccctttttattgcctttgatgttccaattatctttcggttacagtgccgaaatgtctggctggctattagcaccgattgcgttaatttctgtgatgttgaaaatattaattggacgaattttaaatcgttggggctataaaacaacgctaatttcatccgcacttttgatggcaggttctgtgatttcaatggcttggttagataaacaaagttctttaacttggattatttgtaatcttatgtggtatggggcttgtatgtcgatcatttttacttcaattaatacgctggctgtaggcgatctttcaaaacaacagtctggcacaggctctaccgtattaagtattgtacagcaagttgggattggatttggtattgctgtgtcatcaataatcttaaatctttatcgacatttctttagcgaaagtgatggcttacaacaggcattcagctatacttttttaacttcatcactttttgtaatcgcccttgtttggtcgcttatgaaattacacaaaaatgatggcgatcatttacgaaaaatgccttagattaatttgttataatccatagaatttttttatttaaaaaaagggaaatttgcttatatcttattgatatttcttgttggtggagatagctccatcgtttaaccataaatggtggggcattccctgcctaacattgaggtatgcttatgaaactaaaagcaacattaactctcgccgctgcaactcttgttttggcagcttgtgatcaatctagctcggcaaataaatctactgctcaaactgaagcaaaatcctcgtcaaataatactttcgtttattgcacagcgaaagctccattgggatttagccctgcgttaataattgaaggtacttcttataatgcaagctcacaacaagtgtataaccgcttagttgaatttaaaaaaggctcaacggatattgaaccagctttagctgaaagctgggaaattagcgatgatggtttaagttatacttttcatttaagaaagggtgttaaattccacacaacaaaagaatttaccccgacacgtgattttaatgcagatgatgttgtattttcattccaacgtcagttagatccaaatcatccatatcacaatgtatctaaggggacttatccatattttaaagcaatgaaattccctgaattgttgaaatcagtggagaaagtagacgataacacaattcgtattaccttaaataagaacgatgcgactttcttggctagtcttggtatggattttatttctatttattctgcagaatatgctgattcaatgctgaaagcgggtaaaccagaaacgcttgatagtcgcccagtggggacaggcccttttgtttttgtggattataaaacagatcaagccatacaatatgttgcgaatgaaaattattggaaaggtagaacacctttagatcgtttagtcattagcattgtgcctgatgcaacaacacgttatgcaaaattacaggcgggtacttgcgatttaattttattcccaaatgtagcggatttagccaaaatgaaaaccgatccaaaagtacaacttttggaacaaaaaggtttgaacgtagcgtatatcgcattcaataccgaaaaagcaccgtttgataatgtcaaagtgcgccaagcgttgaattacgcagtggataaaaaagcgattattgaagcggtttatcaaggtgcaggaatatcagctaaaaacccacttcctccaacaatttggagttataatgatgaaatccaagattatccgtacgatccagaaaaagcaaaacaacttttagtagaagctggttatccaaatggttttgaaactgatttctggattcaacctgttattcgtgcttctaatccaaatccaaaacgtatggctgaattaattatggcggattgggcgaaaattggtgtaaaaactaacccagtgacttatgaatgggctgattatagaaaacgagcaaaagagggagaattaactgcgggtatctttggttggtctggcgacaatggcgatcctgataatttcttatccccattattaggtagctcaaatataggtaattctaatatggcacgtttcaataattcagaatttgatgctttactcaatgaggctattggattaaccaataaggaagaacgtgcgaaactttataaacaagctcaagttattgtccataatcaagcaccttggattccagttgcccactctgttggttttgcgccacttagtcctcgcgtaaaaggttatgtacaaagcccatttggctatgacgctttttatggtgtgagtgttgatggtaaataattcatattgatttacttattttaagcccttatttataagggctttttatttatcaaggattattctgtaaaaaatatgttaaataactttaacttgagtataatgctcagcattatttctatcggatatgattccgtagaataataaaaattaattgttaatataaggaacaaaaatggatttcaatcgaattattactcatatgaatgatcatcatcaagatgatatggctgccctttgtaaaaaatttggtggcgaaaaggaaatcacagatgtgacgttagttaatgtagattttgctggtttagattttaaatataatggtggcaaaacattacgtgtggaatttccacaacaagctgacgcaggttcaattaaacaagcaatcatcaatctttgtgtagaaaataaaccagttgcaaattacgatcgtatcaaggctaaaattgatgaatttcgtcaagagtttaaaagctgtgtgctttctactttagataaagatggcttaccgatggcgtcttatgcaccaattattttctttgatggaaaatattatatttatatcagtgccattgcagagcattatgagaatttaaaacgcaatccaaatcaagtagaagtgatgtttttagaagatgaaaacaaagcgaagtcaattattgtgcgtactcgcttacgttataaagcaagtgcacgttttattcctcgtgaagatccaattgttgaaaaagtcttagataaattagccgaaactatgaatgatgtaggcggaattaaaacaattcgtgaatttactgattttgatttagttgaacttacatttggaacaggccgttttgtaagaggttttggccaagcttatttgattgatgctaatggggaaatttctcatattggtgtcaaaggcaatccacacgaaaaagaaagtgataaataatattgtctcttaatgaagataaagggttgagtgtaaatttatactcaccccttttgtttacgataagttcgagtgaaattgaaatttctttatttttttaccgcactttattttcattaaggacaaggcttgcttactataatttcgataacctgtctatcgatatgttgcatactttttgatgcaatagcgcagaaattatcaatagttcgatcaagatcgtgttcgacaataccttcattgccgcagcaataggcaatccaaccatgccagttccaggcacagcaacgcccaatccatttttcatcagattaggcgaaacttttgcttcaatgcgttcaggtgttttgcctaaatatttcgcagctgtagcagatgcgagcgcaagagaaatgggttcggtacagcctagggctggcacaacatcgtgtttaacgatgtggagtaatggtttttcaatttcgttaagtctttctaaattcattattacctatccaattaatgcgcttcatcccaattttgtccaacacccacttccacaatcaacggaacaactaattcagcagcggattccatgtgttgtttaatttgctcacggaaaaacgcgactttttctgaccgcacttcaaacactaattcatcatgtacttgcataatcatttcaatatttggatcgtgatggattacttcatcaagtttaatcatcgctcgtttaataatatccgcagccgtgccttgcatcggtgcattgattgccacacgttctgctcctttacgacgcattgcattgctagaattaatatctggtaaatataaacggcgaccaaatagtgtttccacatagccttgtgttttcgctttttcacgaatatcggtcataaattgttgtacgctaggatagcgttggaaatataaatccatgtatttttgtgcatcaggacgggaaatgccaagttggcgtgaaagtccaaaggcggacattccataaattaagccgaaattaatcgctttagcattgcgacgttgctcgctggtgacttcatctaatgatacaccgaagatttcagctgcggtggagcgatgaatatccttgccttgcgagaaagcgttaattaagccttgatcgccagaaagatgcgccataatgcgtaactcaatttgagaatagtcagcggcgacaatagaataaccttcacgcgcgataaatgcttgtcgaatacgacgaccttcttcattccgaattgggatattttgtaggtttggatcgctagatgataaacgccctgtcgccgtcaccgcttgatgataagaggtatgcactcggcctgtttgtgaattgaccatttgaggcagtttatccgtgtaagtggatttaagtttgctcaacccacgatgttcaaccaaaattttgggtaattcgtggctataggataattcttccaatacttcttcatttgttgatggtgcacctttgggcgttttttgtaaaacaggtagcccaagtttatcgaacaaaatttcttgtaattgtttggtggaggctaaattgaatggctggcccgctaatgcgtaagcttgtttttcaagtgcggttaatcttgaggcaatttcgttagattgcataaagagagcatcactatcaatcaaaacgcctgtacgttccatacgagaaagcacatgaagcaatggtaattccattgttttatacaattcaacaagcgttggttcttcttgcagtttcaaccacagtgcttgttgtaatttcattgtcacatcagcatcttctgccgcgtattctgtggcttgttctaatggaatttgattaaacgtaagctgacttttcccttttcctgcaaggctttcaaatgcgatagtttcatgacctaaataacgtttggctaaatcgtccatattatgacgacccgtactatttagcgtataggaaagcaacatcgtatcaaattcaacaccttgtaattcaatgccatgacgggcaaaaatactttcatcaaatttaatgttttgtccaattttgtgaatattaggattttctaagattggtttgatagcggcaagtgcggtcgatttttcgagtgtttttggtgcatccaaataatccaattgcaatggtaaataagcagcttcgccattttcaagagcaaaagagatacccactaaattcgcagacatataatcaagactgtctgtttcagtatcgaccgcaatgagttttgctgtattgagtttttcaatccagcgggttaaatccgcttgagtgagcaaggtttcatatttagtacgatcgatttgaattttaggcgtattttccaccgcactatttcccacagaactttgagctggtgaggtcgcctgatactggttgattttcactggctgttcagtggtttgagtaatagaatctgagccattcatcacttcattaagccagcgtttaaattcgtagcgagcaaaatattcaatgagttgatccttttggctttctccaagcaacaattcatctgttgtcacgttaagttcaacatccgttttgatggttgctaatgtataagaaagagcggcattggatttttcagccaataatttttcacctagttttttcgcaccacgaattggcagttccgctactttttcaagattggcataaatttcagccatgcttcctatgccttgtagtaaaccaagtgcggttttttcgcccacgccagcaacgccaggaatgttatctgcactatcgcccataagtgcgagataatcaataatgagttcaggtggaataccgtatttttcaatcacaccctcacgatccaataggctattattcatggtgttgatgagcataatattgttatcaactaactgtgccatatctttatcgccagtactaatgagcacttttttacccaaacgagatgcttgtagtgcgagtgtgccgattacatcatctgcctcaatcccttccaccactaaaagcggaatgcccaatgcacgaatcatatcgtgcaaaggctgaatttgtttgcgtaaatcatcaggcattggtggacggtgagatttatagtgttcaaacatttcatcgcgaaatgttttcccttttgcatcaaaaacaacggctatatgagagggctgtacttgtgagatgaggctttttaacatatttaacacgccgtacatcgcacctgttggctcacctgcggcattggttaaaggtggaaaggcatgaaatgcacgatataaataagaagaaccatccactagcacaagcggatttgttgcaatttgggtcataaaaatctcgttttaaactgaaaaatgcgagcattatagcgtactttatggtgatgagcgaatggcgggtttaatgtaaaatttatgacgaatattttttgctatggcataatatcagccattcaaatatttaatttaaggaaatcaaatgtcgttaaaattggtcgaaattttagttttgggtcaggttttgcgtttaaatgtacccattgaacaagaagaattactgcgccaagctgcgcgtaatttagatatattggtttccgaaatgaaagaaaagacaggccttattcagcttgatcgtgtgctttctattgtggcactcaatttgagttttgaattaagccaagaaaaaaataaaacggctaaaattgaagaggtattgagaacgggtatccaacaattagatcattcattagaaaatattcgtgttacaaaagaaccgagttaaattaatgatcaaattagagtcattttgtcgttttataagcaactcgttaaaattgataaataaatgctagtcaatactgagaatttgggctagtataaacctataagaattacctggagtgttcgtcagtaggctatgtccctgagccgatactttaaatcttataaattggtttcctatcgttggtgtgtaggcttaacctttgactcgttcattgggctaagaaacctgaaaacggtatcaactgatttccttgaaccgtcgggttcaaggactactgcccacagcggcactctggggtcttccttttcatttctatgaatactcaaaaacgccagcaaatccgcactgaaatccgaaaaatacgtgcaaatttaaccgcacttcaacagcaccaagctgaacaatcagttactcaacaggcgttaaatcttatcgagcaacgacaagccaaaaatattgcattatatttttcttttgatggtgaaatttcgacaaaagccttaatccaatccctgtggatgcaaaataaaaatgtgtatttgcctgttttacatccttttactaaacactatttattgtttttacgctatttacctgatacgccaatgaaacaaaatcagtttggcatttgggagccaaagctaaatgttcaaaatgttttgccattaaatgaactggatattttatttacgccattggtggcttttgataaaaaaggaaatcgccttggtatgggcggtggattttatgatcgcacgttgcagaattggcaaaataagtcttttattccagttggtttagctcatcaatgtcagcaagtagaaaatcttcccactgagcattgggatgtgccactattcgatattttggtaggttgaaacctatcatcaaaatcttattgatagataaaatcaaaatatttcattttttctcttgaaatttattcaaccgagcttacttagtttatgcaaatggcgaaagccgaaatcaaattgaggaaagtgtatgaacattgaaaaatttacgacaaaattccaagaagcgttaagcgaagcacaatcacttgctatcggaaaagacaatcaatttattgaacctgtgcatttattgaccgcacttttaaatcaacagggcggctctattgcgccaattttgacagcaagtggcgtaaatgtggctttattgcgtaatgaattaaagacagaactaaataaattgccgcaagtgattggcaatggtggagatgtacaactttcacgccagcttattaatctacttaatttatgcgataaattcgcacagcaaaaccaagataaatttatttcgagcgaattgtttttgcttgcagctttagaagaacgaggaacgatcagcgatattttgaaaaagtgcggtgcgaaaaaagaacaaatttcgcaagctattcagcacattagagggggacaaaacgtgaacgatcaaaatgcagaagaaagcagacaagctcttgaaaaatatacgattgatttaaccgctcgtgcagaaagtggcaaacttgatcctgtaattgggcgtgatgaagaaattcgtcgagctattcaagtattacaacgtcgtaccaaaaacaacccagtgttaattggtgaaccaggtgtagggaaaacggcgattgtcgaaggcttggcacaacgcatcgtaaacggcgaagtgccagaaggtttgaaaaataaacgtgtgctttcattagatatgggcgcattgattgctggtgcaaaatatcgcggagaatttgaagaacgcttaaaagctgttttaaatgagttatcaaaagaagaaggtcgcgtgatcctctttattgatgaaattcatactatggtcggcgcgggtaaaacagatggcgcaatggacgcaggtaacttgttaaaaccaagtttggcacgaggcgaattacattgcgtgggtgcaactactttagatgaatatcgtcaatatatcgaaaaagatgccgcacttgaacgccgtttccaaaaagtctttgtggacgaaccaagtgtagaagataccattgcgatcttacgtggtttgaaagaacgttatgaaattcatcatcacgtggatattactgacccggcaattgtcgctgcagcaacgctttcacatcgttatatttccgatcgtcagttaccagataaagccattgatttgatcgatgaagcagcgtctagcattcgtatggaaatagattctaaacctgaaccgcttgatcgtcttgaacgtcgaattatccaattaaaattggaacaacaagcgttacaaaaagaagaagacgaagcaagtcgcaaacgtttagaaatgttagagaaagaattggctgaaaaagaacgtgaatatgctgaacttgaagaagtgtggaaatctgaaaaagcaacgctttctggctctcaacatattaaacaagaattagatactgcaaaaaccgaactagaacaagctcgtcgcgcgggtgatttagcgaaaatgtctgagttgcaatatggccgcatccctgatcttgaaaagcaacttgagcaagctgaaaccagcgaaggaaaagaaatgacgcttttacgctatcgcgtcacagatgaagaaatcgcagaagtgctttctaaagccacaggcattcctgtatcaaaaatgatggaaggcgagaaagaaaaacttttgcgtatggaagaagaattgcataaacgtgttatcggacaaaacgaagccgtggatgccgtggcgaatgctattcgtcgtagccgtgcaggtctttccgatcctaatcgcccaattggttctttcttgttcctagggccaacaggtgttggtaaaacagagctttgcaaaactttggctaaattcttgtttgatagtgaagatgcgatggtgcgtattgatatgtcagagtttatggaaaaacacagtgtttctcgtttagttggtgcgcctccaggctatgtcggctatgaagaaggtggttacttaactgaagctgttcgtcgtcgtccatattcagtgatcttattagatgaagttgaaaaagcccatgcggatgtattcaacattttattacaagtattggatgatggtcgtttgactgatggtcaaggtcgtactgtggacttccgtaacactgtggttattatgacctctaacttgggttctgatttaatccaaggtaataaagacgaaagctatagcgaaatgaaagccttagtgatgtcagtggttagccaacatttccgcccagaatttatcaatcgtattgacgaaactgtggtattccatccacttggtaaagaaaatatccgtgcgattgcaagtatccaattagaacgcttagcaaaacgtatggaaactcgtggctatgaattagtgtttaccgatgctttattagacttcattggcgaagtgggatacgacccaatttacggtgcacgtccattgaaacgtgcaattcaacaagaaattgaaaacagtttggcacagcaaattctatctggtgcgttattacctggtaaggttgttaccattgattacgccaacgcagaagttcaagcgagacaataggtattaaaaaagtgcggtaaatttaccgcacttttcttatgaacctaaacgctgacgtgcaatttcaaataaacatacccctgttgcgacagatacatttaatgatgaaactgaaccagccattggaatactaatcagttgatcgcaatgttcacgtgttaaacgacgcattccttcgccttcggctcccataacaagtgctagtggtcctgtcagtttgctttgataaatggtttcagtggcttcgccagcagtgccaactacccaaatgttatgattttgttgtaaatcgcgcagtgtgcgagaaagattggttacacgaattaacggcacggtttctgccgcgccacaagcaactttacgtgcaatagatgttaattgtgcagatttatctttcggtgcgatcactgccattgcgcccgctgcatccgctgttcgcaaacatgctcccaagttgtgcgggtcagtcacgccatccaaaactaataaaagcggattttgtttatttgcaagaatttcatcaagatcattttcattaagttcttttgccgcttgtactcgagcaatgacaccttgatgaacttcaccatcggcttttttatcaagagtttggcgattaacaaattgcacaccaattccgagggaatacagttcgtttaagagtggctgtagccgtttatcttcacggcctttaagtacgaagacttcaattaaacgttctggcgaatgggttaaaatactattaacagcatgaatgccgtagatttgttctgacataaatttctctttttcttatttgaatttttaattcattcttacaataggaagtgaattattttcgttttctagatgttttcttcgaaacttctttcttttttaccgcactttttcgttttttggaggctttagacggtagctctttaaaaactttcttagctttttctttcgccgtttttccagctcgacgagatttacgttcactccccattagcgagaaatcgaccattttattttctaaatgtaccgcttcaactttgatgcgaactttatcgcctaagcgatattgcattccgctattttcgccgattaaacgctgttttgctgcatcgaattggtaataatcgttttctaaggtggaaatatggactaaaccatcgatgaataaatcatctaagcgtacaaataaaccaaatcccgtcacagatgaaataacaccgctaaattcgccaccgacatgatcttgcatatattcacatttcagccaatcagccacttcacgagtggcgtcgtcggcacggcgttcggtcattgaacagtgattgccaagtaaatccatttcatcaaaagagtaatgataaccgcctgtatcggtggttttacgttttgcgccttgttctttagcgagtaaatatttgatacctcgatgaagtgttaagtctggataacggcgaattggcgaagtaaagtgtgcatattcttccaaagccaaaccaaaatgcccaatattatcagcatgatagacggcttgacttaatgaacgtagcaacattgtttgaataagttcatgatcaggtcgttctttaattttttctaagagcgcagcatagtcttttgtagttggttttaagccaccttctaaagttaaaccaaactcacttaagaaagtgcggaacgatgttaatttttcttcgatcggggtggcatgaatacgatataacgcaggctctttatgtttttccataaaattagctgccgcgatattcgcaagaatcatacattcctcaatgattttgtgggcatcattgcgaacaacgggttcaatacgctcaattctccccattgcattaaaaataaacttagtttcaatggtttcaaaatcgatcgcaccacgttgatgacgcgcaccaagcaacgcttgatagagtttataaagctcttctaaatgaggcacaagcgtagaataacgagcgcgtaattcttcatcgccttcaagcattttggctactttggtataagtgaggcgggcgtgagaattcatcaccgcctcataaaagcgataatctgttagcttacctttggcagacatttgcatctcacacaccatacacaaacgatccacttgtgggtttagagagcataatccgttcgataaaatttcaggtagcattggtacaactcggtttggaaaatagaccgagttaccacgattatgcgcttctacatccaaagcggaacgtaaacgtacgtaataactaacatctgcaatcgcgacccaaagtttccagcctttgccgtgtttttcacaataaacggcatcatcaaaatcccgcgcatcttcgccatcaatggtcacaagcggtaaattgcgtaaatccacacgccctttttttgcttcttcaggcacttcttcagtgaattttttaacatatttttccaccgcacttggaaacttatggggaatatcgtggttacgcaaggcgatttccacttccattccttttgccatattatcgcctagaatttcagtgattacgccaattggctggttaaaactggcagaacgtttttgcaactcgacaaccacaacttgtcccatacgtgcaccattacgatgttcatttggcacgagaatatctcgaccaattctactgtcatcaggcaccacatagctaaaaccgttttctaagaaaaagcgacccacaatttgttttttacgactttctaatacgcgcacaattcgcacttcacggcgaccacgacgatctaatccagcaggttgcgctaagacaaaatctccatgcatgactctttgcatttgatggtttggaatgaataaatcatcctttttgccatcgacctgtaaaaaaccaaaaccttcgcgatgaccaattaccgtacctttaaataaatctaatttttctggtaaggcatagcgtttacgtttagtgaacactaattgcccatcattttccatcgcacgtaatcggcgacgcatcgcttctacttgatcttcatttcgaatggaaagtgcggtcaaaatttcatcccgattcatcggtgcattattgtctcgaataacgcttaaaataaattcacggctcgggattggattgccgtatttttccaattctcgtttgtaatgaggatcttggttgattaagtttttacgtttttttgtcattattttttacagttttaaaaagtgcggagagtttgacactgtaaggaggataatgcaagacggggataaaattatcactgtatattttaaggatattttaaaattgaagaacttaacgatctttccccagcactataacagtgatgactttttatagatatttttaaagtatgaaaagcgcggtaaaaattttatgcaggaatgcgttctgttacgagcatttgtagttttcgtaaaataacatttaatactacgccataggctgggacgaacaagataattcctataaataatttaaatagataatctacaaagccgagttgtgcccagtgttcagccatgaacggatctgcactttggtagaaggcgatactgaagaaaacaaacgtatccgccattgaaccgaatgtcattgagctagttggcgccacccaccatgtttttaactgacgtaagcggttaaatacgatcacatcaagcaattgtcctaccacgtaagcggcaaagctcgcaatagcaatacggaatacaaacagatcaaaatgcgttaatgattcgaaaccttggaatttgctttcagagaataaaacagatatgacgtaacttacaataagtgcaggaaacatcaccacgaagatgatttttctcgcatcttccgcaccgaaaattcgtacggttaaatcggtagctaaaaagataaatgggaatgtgagcgttccccaagtgctgtggaaagaaaaatcatttgctgcaccaagtgcggttaattttagcgtgatttcaaaagggatttgtacaaagtaattgctcgctgcaatgatgaatatgtggaaaaagctgagccagatgattgcacgacgtttttgttgatcattaaagatcggagaggttaatttcatgttgtacctttttagtttaaatgaatcggggttagggaacccgaggttgaatatagggggctagatgatacgcatatttctaataattgcaagagtcgattacatttgagttttatattttatgaaaattgacgaatgattttacagcctttattctatttgcatttttcatcaaatttgaaaggagagaaaatggagttacacaatattcgtgatgaatatactaaacgagtgctttcacaacatgattgccatgaaaatccaatctcgcaatttgaacagtggcagaaagaggctattcacgctcaagttaatgaacctaccgcaatgaatattgcgactgttgatgaacaaggtcgcccaaatagccgaatggttttgttaaaagaagtcaatgaacaaggttttgtcttttttacgaattatcttagtcgaaaaggcggctgtattgagcgtaatccttatgtcgcgctgactttcttttggcctgaattggaacgccaagtgcggattgaaggtaaggcggttaaaattccagcagaacaatccgataaatattttgctacccgaccttacaccagtcgtataggggcttgggcaagtgagcaaagtgcggtgatttctaattataaatctttgctagcaaaagccgcattggttgccgctaaacatccattaaacgtgcctcgaccagattattggggcggctatttagtggtgccagaaaccgtggaattttggcaggggcgtccaagccgtttacatgatcgcattcgttatcgtaaagaaagtgataattggattagagaaagactttctccttagtaaattgagcataaaaataaccgcactttagttgtatcccgaaagtgcggttaattttttctaaattttagcgtttagctttatttattaatgcgtgctagtacttgttgttgtacgatttgcacgtttacgatcgttttccgttaaaagttttttacggatacgaatcgactcaggtgttacttccactagttcatcatcatcgataaattcaatcgcttgttcaagactgaattttacaggtgtagttagcacaatcgcatcgtctttacctgacgcacgcatattagttagttttttaccttgtaagcagtttacggttaagtcatttgagcggctatgaataccgataatttgcccttcataaacttctacgtttgcatcaatcattaacttaccacgttcttgtaagccaaataatgcataacccagtgctttacctgttgcattagaaatcaacacaccatttttgcgctgaccaatttcgccgcctttgatttcatcatagtggctaaaacttgagtaaagtaagcctgtaccagaagtcatggtcataaagtcgccacggaagccaatcaatccacgactagggataatgtattccaaacgcacacgacctttaccgtcaggcaacatatcacgaacttcacctttacggatacctaatgcttccatcacagaaccttgatgttgttcttccacatcgatagttacttgttcgtatggttcttgttttttaccgtcaatatcacgataaattacttttggacgagaaaccgcaagctcataaccttcacgacgcatattttcgattaacacggaaagatgtaattcgccacgaccagatacacggaattcatctgggtttggggtttcttctactcgtaacgccacgttgtgaaccaattctttatttaaacgttcaagaatttgacgagatgtgacgtattttccttcttgccctgcaaatggagaggtgtttacacagaagaacatggttacggttggttcatcaaccgttaatgatggcagtgcttcaactgcgttgatatcacaaatcgtatcagaaatatttaattctcctaaaccagtgatagcaacaatatcgccagcataagcaacgtcttcttcataacgttgtaaaccaagatgtccaagtacttgaccgatacgaccttgacgagtttttccttcactattgatgatagtaactggttggtttggtttaatcgaaccacgcttaatacgaccaatgccgataacacctacatagttgttgtagtctaattgtgaaatttgcatttggaatggtgcatcaagttctactttgggcgattctacatattttacaatggcttcaaataatggcgtcatatcttccgctaaatcttcgtgttcaagacctgcaacaccatttagtgctgaagcatagataattgggaagtctaattgttcatcgcttgcaccaagattgacaaataagtcaaatacttgatccacaacccagtctggacgcgcaccagggcgatcaactttattaattacgacaataggttttaaaccatgagcgaatgctttttgtgtcacgaaacgcgtttgtggcattgggccatcaaacgcatcaacaactaatagaacagaatccaccatagaaagtacacgttcaacttcgccaccgaagtctgcgtgtcctggagtatctacaatgttgatgcggtagtcattccagttaatcgcggtattttttgcaagaattgtaatgccacgttctttttcaagatcgtttgagtccataacgcgttcatctacatcaccacgtgcagattcaaaagtaccagattgttgaagaagtttatctacaagggtggttttaccatggtcaacgtgcgcaataattgcgatgttacggagttttttaatatcaatttcgtttttcattgtttaatgctttaattggataagatgcaatttttattgcattgttacataaaaaatggcgcaatgaattgcaccctacatttctacatttgtcgaaaaggtaaaaattatacatgtatttttctttttctgctatggctagaataagaaaaataaatttcatgaaaaaatagcatggctacgttataatgcgtgcttatcttaataagactaaccatagaggattttctaatgccaaacgcaaatgcaatcgccaatgtatttaagctaattgaagaaaataatgtgaaatttgtacttcttcgatttaccgatattaaaggtaaagaacatggtgtttctatcccagttagccttgttgatgaagatatgtttgaagacggcaagatgtttgatggctcctctgttgaaggttggaaaaccattaataaagccgatatgttgcttatgccaatagctgaaacggcggttgtcgatccattcgcgcaaatcccaacgctttctattcgttgtagtgtttatgaaccaacgacaatgcaaagctatgatcgcgatccgcgctctattgcaattcgtgcagaaaattatatgcgttcaacaggtattgctgatcaagctttttttggtccagagcctgaattcttcttatttgatgatgtgcgttttaatgtatcaatgaacaaagcatctttttctattgatgatatagaagctgcttggaacacgaataaaaaatatgaagaaggcaataatgcttatcgcccattaaaaaaaggcggatattgtgccgttgcaccgattgatagtgcgcacgatattcgttctgaaatgtgcttgattttagaagaaatgggattagtcattgaagcccatcatcatgaagtggcgactgcagggcaaaacgaaattgcgactaaatttaatacgctaactttaaaagcggatgagactcaaatttataaacatgtcgtacaaaacgttgcattagagcacggtaaaacggcgtgttttatgcccaaaccaattactggagataatggttcgggtatgcactgtaatatgtcgttaagtaaagacgggaaaaatattttccaaggcgataaatatgcaggcctttctgaaaccgcactttactacatcggcggtatcattaagcacgctaaagccttaaatgcgttcactaatccaagtactaattcatataaacgtttagtgcctggttatgaagcaccagtattgttggcttattctgcaagcaatcgttctgcctcgattcgtatccctgccgtaacaaatccgaaagcgattcgcgtagaagcacgtttcccagatccattggcaaacccatatttagcatttgctgcattattaatggcaggtcttgatggcgtggtaaacaaaatccacccaggcgatgcgatggataaaaatctttacgatcttccaccagaagaattaaaagatattccagcggttgcaagctctttagaagaagcattgaattcattagaaaaagactatgaatttttaactcaaggtggcgtatttgctaaagattttattgatgcgtttatcagtatcaaacgtaaagaagtagaacgtttaaatatggcaccacatccagttgaatttgaaatgtattatgcgtaatgatatataaacaagaacaatgcggtgaaatttcgccgtatttttttaaaggagtaaatatgactaagatttcttctcaaaagaatgactagattgatttaatggagcttttctgcgtattcatagcaatagctggcgtataggcctgtacggcaaaagagcagtggacttcaactgatattgggttgtgcctcgttcaaccgatttcggtaacttactgcctacacgtgtggaatatgccacattattggcgacagtgaattttcttctgtagcgttatcaggttcattgtatggtcaatttaggcacttccttctttctagagatttaaaacgccagttcttaaaacaatctgtatgggtgaaaattatactaaggagatgacagaagaataaagacatatttatattgaaaatgtagtctctaagtatttagttgttcacgaaattgatccgaagaaaaaagatttaactgagttggataaaatagctttaaaaattaccttttcagcagaaactccaaaatatgcacaatctgtattgacagagtatgtaaattttgtaaatcaatatagtcttaaccaaacaaaccaagagtttaaacagagatttaacctccgtttagatgagctgagatttagtaaagaacaaattgaagagaatctaacagaagcaaaaaaggttcaagttgaaaacttaacaaatgcgttagatattgctaaaaaagcgggtattaaagatttttcaagaggaaataatatctctgattctaaattagcagatggtacatatttatttatactcgctgaaaaatatttacaggcgcaactagatattgctaaaaacacacctgttgtttacccagctaattattatattacagatagacagttatttaaattaaataaattagcttcacaattggaattagttgaggatgtaaaaacgtattattatttaagctctcctgattatcctgtggttaaagataatcctaagagggcgttgattcttgctatcgggtttattatcggtattctgttacccactttctttattttattaggttcggttatacaaactaataaaaagcagtcatgaagaaaaaggctatttttatcagtacgggagcggttattatctttaaaatattaactccctgttatagctggtgtactagcaaaatttatgatgctttccgaaaatgtttgcctgcaatggataatccatatttttcatcgctttagcgaagcggaattaggtttatatgcaatgggagcgcaaattgcatttatcttatcagtttttattttagcgataaataaagcgcttgttccctatctgtttgagaaattaaaacaaggtagtgttaagttaaaagatttacatagatggtcgttactttcattattgattgtgcctattccatcacttgttaccttaattgttccggaacaatggctattgttcttcttaggcaaacattttatcggggtaaaatactacattatagtattcttactctctacgagtttaaccatcccttatttgttcttagtaaattatttgttttatcacggaaaaactaaagaaatttcgttttgctctgtattatcaacaatgatttacttgggagcattggggggattaatttttacggatgtggtttatattccttatgctagtgtattgggggcattggggattttacctgtattatataaaataacaaaaagagtagaagaaaatgaatatgccactcattagtataataatgcctgtttataatgcagaatgttaccttaatcaaggtattttatcttgcttaaatcaatcttatcaaaacattgaattaattttaattgatgatggttcaacagataaaagtattgaaataataaataacatcattgataaagataagcgggttaaacttttctttaccccaactaatcaagggcctgcagcggcaagaaatatagggttagaaaaagcacaaggtgactatattacattcttagatagtgatgattttattgcaaatgataaattagaaaaacaacttaattttatgttgcaaaatcatcttgtaatgacgcatggcaactatgctttctgtgatttggaaggaaatcagataaaattagttacgactagtaaaaaaattgattatttaaccttattacaaggtaaccaatttaaaataatgaccgtacttgttgaaagagaatctattaaattacttaggtttcctaatattaaacacgaagattacgccttctttttggattgtttaaaagaagttaaacaatctatactatatagccatcaggcaagttcatttgtaagaatcggtaaagtcagcgtttcatcaaataaatttaaaagtgcaatctggacatttaatatctattttaaaagagagaaactaggtgtagtaaaatcaatttattattttatcctctatgcctataatggatttattaaatacaagaaataaaaatatgatttcattacttattattagcttcgggcgttatcaagaagtattggaaacgtttgcatgtgtcaataaatatcatggtaaaaaaattgaattacttttccttgataataatccagcaagagagttggaaatagctctatcttctattgtagaaaataatagtagcattttatttagctattttcataccggtgagaatctaggtgttgctgaaggacgtaattttttaattgaaaaagctcaaggagatattttaattacacttgatgacgatattgaaattgaagatattattcttttaattcagaaagtgactaattatatggcaaataatgctaaagtaggagcgttagcctttaatattaaaaactattttactcgtaaagcattatcacacgagatcccacatggtaataaaaagttagatttttcacagaatttactgacttattattttattggtgctgggcatgcaataaggaaagaagtctatcaaaaagcggggttttaccctaaggatcttggtctatatggtggtgaagaaagagatttgtcatttaggattttagaagcaggctatcagatactttatgcaagtgatattgtgatttatcataaggtttcaccaaatggaagaatgatgagaaaaaaggaaaacttctttagatatagaaatcaacttattgttttaaatagatatatgccaatgagatatcgattaacttctaattttgtttggtctattttttatcttgtaaaaatgaacggagaaattctagatattgtaaaagtattatcagaaatttttagtttaaaaagaaaggtagtatcagataaaacaattagatatattaaatttgttgatggtaggttatattattaatgattatttgcttggtattgtttttatttatttctctttcttcgttgatggggttaaaatataataaattatctagccaactctttatttttaatattttaattatctattttttttactgtttttagatatggcgtaggtgaagagtattttcaatatgaagaattatttaaacaagtgttaccaataaataagatatcaatttcttattttaaggataatgttcatgatattgagtatggttatttgttttttgaatcagtaattaaatactttagtgatgaacaccttgtttttcttgttttttatgtctttgcaatgttcctttttctatataaggcaataaacaatactggtttatatagaaatatacagttgcttattttctattcttttatatttttagaatatatttttagtgtgcacagacaaggtgtggcaatgtgcataatatattatgctatcatactgatgatccatgaggataaattatttaggtatactttgttggttattttagcctcgctatttcataagatagccattatacttattccgctttatttttttataagaaaagaatttaaagtatctgttctattttacatggttgtaattgcattatttatatcttcttttgacttaataggtatagttattaagtggtgtaatgagaatttctctaatgtggctgtttttagacgggtgtttcactattattttaataagcatgatgcaaatttaaaaatgtctgctataccttacatgcaacgagcaataatgttatttatactattcctattttataaaagaatcccctatacttattctaacttactgctcttatatgttagtcttttctttatattctctaatgtgggagtgttagcaaatagggtttcaggaattttattggtatcttatgcaatatttttctctgttctaatttgtaacttaaaatttaagagaaatagattacttattattttatatatgttttttctaacttagtatttttgttaagaatattcatgatattcatctgttaactaataagctaaattattttccatatgaattaaactataagacagttaacatatttcaggagggagaatgaataaaagagtaataattatcagtagtatgaggatgttatttttatttcttcttatagataaaaggagattaggggatgtttttatattttctaataaagttgaatctaaaattaaatctgcatttgagtttcatagtgcttattctatctttgatttactatttaaaaaaattatttctgaaattaaattaatatatttttgttataaaaatagaatagaatttaaaaaaactgttgtttatggtgctgaccatattttaggctcttcattttttttaagtaaatgtcttttttatttaattgaagatggcactgagaactatcaaactaaaaattataaaagaagtttaaaaaatagattgttttcactacctaaatttggaatgcataaaaatgttaagaaaatttatttaacaaggaatgataatattcctgattgtattaaagaaaaagttgaagtaattaatattcatcaactttggaaaaataaaacaaaagaagagcaagatgagattttatttttactaagtgtagataaaaataaattagaaaatttaaagcataaaagtatcgttttatttacacagccactttcagaagataatgttttaactgaggaagagaaaatcgctctttataaaactatcataggaaattatgatcaagagaaacttgtaattaaaacacatccaagagaaactacaaactatcgaaattatttccctaatattgaggtttttagtgaaaattacccatctgagattttagatgtattaggcataagatttgaaaaagtggtaacaattttctcaacggctgtatatgtatacccaaaagaaaatattattttttatggtacaaaaatacaccataaattattatcaaaatttggaagaatagaatatgaataagttatttttgtctaaatttattttagctttattagattttattacatttaatgcttctttttcattatctttactaataatatcctattatcatcatggatatgatcaatatttacctatttacgaaatagatgatagatattacattcatacgcttttaggttttctttgtgttggatggtttgctattaggctaagacattatacttatagaaaacctttttggtttgagttaaaagagatttttagaacacttcttatctttgcggtttttgaacttgcaattgttgcattttctaaattgtatttctctcgctatttatgggtgcttatatgggggattacctttctactttttccattggcgagggttttagtaaagaaatttcttataaaatcaggttggtttcttagagatacaattgtgattggttctggggataatgcttttgatgtttataatgcattaagagatgaaccttatttagggtttcatgttacgtattttatttcagtttctaatattagtaataatgtaaaggaattaaatattcctatgttaaataatatgtcctcttggacatcagtaactaaaaaaacagatcaatttattattgcattggaagatgatgaagaggtagatagaaataattggttacgttatttttccacaaatggatatcgttctgtttctgttattcctacattgagaggcttacctttatatagtacggacatgtcttttatgtttagccacgaaatgatgttattacgaatgaataataatttggctaaactatcttctcgtattttgaaacgaaccatggatattgttggttccttagctattattattatattttcccctgtgttgctttatctgtattttgcagtaaaaaaagatggtggtaatgctatttatggacatcctcgaattggtcgtaatgggaagacatttaactgcttaaagtttagatccttgattgtaaattccaaagaggtgcttgatgaattgctaagaacagatcctcaagcaagagcagaatgggaaaaagattttaaattaaagaatgatcctcgaattactaaaatcggtgcttttattcgcaaaacaagtttagatgaattacctcaattatttaatgttttaaaaggtgaaatgagtttagttgggcctcgcccaattgtaattgatgagctagagcgttatgaagaaaacgtagattattacttaatggcaaagcccggtatgacagggctttggcaagtcagcggacgtaataatgtcgattataatactcgcgtttattttgattcttggtatgtaaaaaattggtcactttggaatgatattgctattttgttcaaaactgtaaatgtagttttaaaacgagatggagcttattaatgttttatttaattatttcttaagcgagatttcttctatttgtattactttaaatttattaactcaacaagatgaatattttaatcaccggcggttccggcttcatcggttccgctcttattcgatatatcatttatcagactcaagattccgttatcaatattgataaactgacctatgcggcaaatcaatcagctttgaaagaggttgaaaataatcctcgctatgcttttgagcaaattgatatctgtgatcttaaggcgatagaaagcgttttcgagaaatatcagcctgatgcagtgatgcatttggcggcagaaagtcatgtcgatcgttctatttctggagcagctgattttattcaaaccaatattgttggtacttatacgttgttagaggttgctaagaattattggcataccttagacgaagctaaaaaaacgacctttcgattccaccatatttctactgatgaagtttatggtgatttatctctttcagaacctgcttttaccgaatattctccttatcatccaagcagcccttattcagcatcaaaagcagcgagtgatcatttagtttatgcttggcatcgcacttatggcttgccggtgattattacaaacagttccaataactatggagcttaccaacatccggaaaaactcatccctttagtgatttcaaatgcactgatggggaagcctctgccaatttatggtgatgggcagcagattcgcgattggttatttgtggaagagcatgttcaagccttatatttagttttaacaaaaggtcgagtcggggaaaactataatatcggtggaaattgtgaaaaaacaaaccttgaagtggttaaaacaatttgtcaattactcgaagaacttgcaccaaataagcctaataatattaagtattacgatgatttaattatttttgtaaaagaccgacctggtcacgatgtgcgatattcattggattgttccaaaattcatgcagaattaggttggcaaccgaaaataacctttgaacgaggacttagccagacggtacaatggtatttgtttaacagttaatcttcttaaatagggtaaaagataagaatgtttatctatcttgtgattttttctctttttattagacaataaaatataagatagttgaagaagtaaaaaatattgcctgagttatgagccaagaatgactggcttgtgaaataaaatatatgggaaacaatatgtataattcctaaaatacaaatacattttgtttctaaattatgggtgtttaaatttttaataaagaaaaatattggagctagaataatcaggattaatgctataaatccaactaaaccacgtttcacccaagattctaaatattgattatgtaaacttccaaaatttaaagtggttttagccatttgtttagattttacttgtttatgtctaaactcctcgtatccattactcccatggccaaagataggcgcttcctttatagcaattaaggcattttcccacatgtcaaatctggcacctaatgaggtgtttctattgtttttttctaaatagctaacaatatctgattttgctgcgttatatcgtttttcaattccgaatttaggattggcaatgagtgcggttaatccaatggtaataactgtaactaaagttataataagtttcttattaatgtcttctttgtatagaaataaaattataccaattacaacgggtaagccaatccatccacctctagccccagataatgcactagtaatgatagcaagtatactggctacaaacccaaataatgtagacttatattgttttttgatgaagaagtgaagagtgataacaagggcgaatgtggctaaagagatcgcaatgttgcccatttgtatgtgcattgtttcaggaaatggtttttcataccctaatacaaacttctgaaataacgcaacgcatccagtaattaatgcactagaaggaattgcgtataaaattgttttcctttttattggaaagtttttgaataaaagtagtagaggaatgaataatagaagtcggcttggattatctatttctctaatcccatctttattgataatgatagataataagaatgtggagaaataaaataaaaaagaaaaaatcagttttttatcttcagagctaaaagatagttttttctttaatggtatgaaataaatcaatccaatcgcgcttaatattattggtgcatagttatagccctttggaacgattaaaacggttaagaaaaatagagaaactaagaggttaattgtaaacgttagatgtttttcttgaatcatacgaataaaagcatgtgcaaacgtaaattgagtagattctaccttaaatatttgtaaaatgcttgttattcatgattgaatgatgtgaaattaggtataaagctggtatagtttctaaatttattttgtttatacatgggggaataaatatgcaaattacactttcaaataacttagcgaatgatgcttggggaaaaaatgctattttgagctttgactctaataaagcaacaattcatttaaaaaataatgaaaaaactgaccgcactttagttcaacaagctgctcgtaaattgcgtgggcaggggattaaaaatgtggaattagtcggtgaagaatgggatttggaattttgctgggcgttttatcaaggtttttataccgcaaaacaagattacgggattgagtttccgcatttagatgatgaaccgcaagatgaattattagcgcgtattgaatgtggcgattttgtacgtgggattattaatgagccagcacaaagcctaacaccagtaaaattagcagaacgtgcggctgaatttatcttaaaccaagctgatatttataatgaaaaaagtgcggtaagttttaagattatttctggagaagatcttgagcaacaaggttatcacggaatttggactgtgggtaaaggctctgctaatttgccagctatgttgcaacttgatttcaatccaacacaagatccgaatgcgccagtgttagcttgtttagttggtaaggggattacttttgacagtggcggctacagtatcaaaccaagtgatggaatgagcacaatgcgaaccgatatgggcggtgctgcattattaacgggggcattaggtttcgcaatcgctcgtggattaaatcaacgcgttaaactgtatttatgttgcgcagagaatttgataagcaataatgcctttaaactaggcgatattattacttataaaaatggcgtgacagcagaagtgttgaatactgatgcggaagggcgtttggtgttggctgatggattgattgaagcggacagccaaaatccaaattttattattgattgtgcaactttaactggcgcagcaaaaatggctgtaggaaatgactatcattcggtattatctatggatgatgatctcgtgaagaatcttttccaatcagcacaagaagaaaatgaacctttctggcgtttaccatttgaagattttcatcgctcacaaattaattcatcttttgccgatattgctaatattggttctgttccagttggggcaggggcaagtacagcaacggcatttttatcgtattttgtaaaaaattatcaacaaaattggttgcatattgattgttccgctacttatcgtaaatctagtagtgatttatgggctgttggggcgacagggattggtgtgcaaactttagcaaatttaatgttatcaaaatcattgaagtaaggagatatgatgacagaaagaactttttcgattattaaacctgatgcggtaaagcgtaatctaattggagcaatcttaactcgttttgagcaaaatggctttaaaatcatagcctctaaaatggtacgcttaactcgtgagcaggctgaaggcttttatgccgagcatcaaggcaaagaattttttgcgcctttagttgaatatatgatgtcttcgccgatagtggtttctgttcttgaaaaagaaaatgcagtgaaagattaccgcactttgattggtacaacgaatccagaaactgcagaagaagggacaattcgtaaagattttgcattaagtcagcgtgagaattcggttcacggatcagatagtatagaaaatgcaaatcgtgaaattgcttatttctttactgattgtgaaatttttgagcgttaattgatagcaaaaagcacctaaaagttttaggtgctcttaaatttttaatgcttacaaaattagactttcttaaggtttatagatgaactcaattccttcatcatcttcttcagtccaatcatcatcccagtcttcgtcatcatcttcttcagtccaatcatcatcccaatcttcgtcatcatcaaattgatactccgctagttgttcctgatgataatcttcccatttgaattttacttcttcaggtgcaacttgttgtgtttcagcttcgcgtggatttgctatgataaagtccataatatcacgacaaagtggtggaacatttttccctgttgcagctgaaatcaagtaatagccttcttcccaacctaattgttcagtgatttctcgaacccgctcttcagcttcttcatcgctcatcgtatcaattttattgaatactaaccagcgtggcttttctgataatttttcactgtattggaaaagttcagattcaataatagcgacattatctgctggattagatccatcaattggagcaatatcgactaaatgaataagcactctacaacgttctaaatgttttaaaaagcgaattcctagccctgcaccatctgcagccccctcaattaatccaggaatatctgccactacgaaactgtgtgagtcgtccactttcacaacaccgagacttggtactaaggtagtaaatggataatctgcaacttttggtttggcggctgaaacggcacgaataaaagtggatttacctgcattaggaaaaccgagcattcccacatcagcaagtagcattaattccaataataaatcgcgtttttcacccggtgttcccattgttttttgacgcggtgcacggtttaccgatgatttgaaacgggtattccctaaaccgtgataaccacctttggctaccaacattttttgaccgtgttgggttaaatctcccaaggtttctttggtgtcattatcaatagcgcgagttcctacgggaacaggtaaaataatatctttaccgcgacgtcctgtacaatctgaactccgtccattctctccacgctctgcggcaaagcgtttattaaagcggtagtcaattaaggtattgaggttttcatcagcctgtaaatagacatcgccaccatcgccaccgtcaccaccgtcagggccacctttcggtataaatttctctcgacggaaacttacgcaaccgttgccaccatctccagcctcaattcgaataagggattcatcaataaatttcattcaaacttctccaaaataaaccgcactttaatgagttttatgcggtaataatttatgtccaatcgcggataaaattgctccgcatactacaacaaatgcgccaatatagctaatattattcaattccggtgccgcaaaatctgctgggctaaaataatgcgcaatatgagaaaataggatcgtgaaaagaggtacaagtgtgataacaacactgacttttgatacatcccaacgattaagtgcttccgcataagagccgtatccaattaaggtatttaaacagcagtaaataaaacaaatcagagctaaaggtgtgagttcttgtacttgcgaaaattcaaccatcggcataaagactatggcacaacctaaatacatcattagcaagatttgttgtgaattaaatttacgtaacattaatttttgcgccattccataagcgacccaaataagagcaccccctacacctaaaatgacacctgttgaatactgatttagtccagcaaatgcatcaaaacgatcattaaagaataagcctaaaccaattaataataagaaaagcccgatcttttggtgcaaccctaatttttctttgaaaatcagtacaccacagatgagcattccaaaagaggataaatgaataaaaatttgtgcaactgacggttcaatgtaattcagcgagctactaaataatagaaaattgctggtaagaccaattactccaataagcataatccacgcatattggcgaactttcattaattcaggtaattgttttttataagcaagtaaagccaataatgaaactgcagcaataatgaaacgataccatacgatagtttgcgcattcattacagacaaaacttgtttcaaggcaataggcaatgacccccaagccatagcggtaataagcgcaaaggtaaagcctagtaaaggttgttgtttcattgcttgctcgcttatgtgaaattaaaaaagacaaaacgccccacaaaattgtagggcgtctcaatggaatagattttaaattattcagtaacaatacttacgtatttacggcttttctcgccttttacttcaaatttaactttaccatctgcggttgcgaataaggtgtgatctcttcccattcctacgttgttacctgcgtggaatttagtaccacgttggcgaacaataatgctacctgctaatacagattcgccaccgaaacgtttaacaccaaggcgtttagcttcagaatcgcgaccgttacgagttgaaccaccagcttttttagttgccatctacttgatctcctctgaaattatgcttgaatcccagtgattttcacttctgtgaaccactgacgatgaccttgttgtttacggctgtgtttgcgacgacggaatttaacgattttaactttctcgccacgaccttgtgcaactacttcagccactacttttgcaccagcaactactggtgcaccaattttaacatcttcaccattaacgaccatcaacacagaatcgaactcaactgttgcgccagttgcaagttcaagtttttctaaacgaacaacttgaccttcgctcacacggtgttgtttaccgccactttggaaaactgcgtacataaatactccgcttaattgtgttttcctgctttttagcagtccacacttaaaaattcatataaataggtcgcgaattctacggaaaaatcctacctatggcaagaatttatttataataaaataaaaaaattcccttcatttgcggattgatttcagaaagtctgaaaattcgggtaaaatgcaccgcacttttgactgataaatgatgaaaaatgaagaaacaagatcttatgagcatagacgagatccagaaacttgcagatcccgatatgcaaaaagttaatcaaaatattcttgctcagcttaattcagatgtaccgctaataggacagttaggtttttatattgttcaaggtggtggtaagcggatccgcccgttgatcgcagttctcgcagcacgatctttagggtttgaaggatctaattcaattacttgtgctacttttgttgaatttattcataccgcttctttgttacacgatgatgtcgtagatgaatctgatatgcgtcgtgggcgtgctacggcgaatgctgaatttggcaatgcggcgagtgtgttggtaggcgattttatttatacgcgtgcatttcaattagttgcacagttagaatcattgaaaattttaagtattatggctgatgcgactaatgttttagcggaaggcgaagttcagcagttaatgaatgttaatgatcctgaaacgagcgaagctaattatatgcgtgtaatttatagcaaaactgcccgtttgtttgaagtggctggtcaggctgcggcaattgtcgccggtggaacagaagctcaagaaaaggctttacaagattatgggcgttatcttggcactgcatttcagctcgtggatgatgtattggattatagtgcaaatgcgcaagctctaggcaaaaatgtaggcgatgatttagctgaaggaaaaccaacccttcctctactacacgctatgcgtcatggaaatgctcaacaggcggctttaattcgagaagcgattgagcaaggtggtaaacgtgaagcaattgatgaagtattagctattatgactgagcataagtctttagattatgcaatgaatcgtgcaaaagaagaggctcaaaaagcagtggatgcaatcgaaattttgccagaaagtgaatataaacaagcgttgatttcattggcatatttgtctgtagatagaaattattagtccataatttagcttatatacttgatacccattaattttaattaaactttatgaatacagaacttcaacctaaactagaaaaaagtgcggtcaattttcaagctaaaccgcgaaaacaaaaaatccgtaaggatcctaacgcaccttttattcgtgaaaaacttgagttgccagatggacacaataagctccttttgcattcttgttgtgcgccttgctctggcgaagtgatggaagcaattcttgcatcaggcattgaatttacaatttatttttataatccaaacattcatccactcaaagaatatttgattcgtaaagaagaaaatatccgttttgcaaaaaaatttggtattccatttattgatgctgattacgatcgtcaaaattggtttgatcgtgctaagggtatggaatgggagcctgaaagaggtattcgctgcacaatgtgttttgatatgcgttttgaaaaagctgctgaatatgctcataaacatggtttccctgtatttactagttgcctaggtatttctcgctggaaggatatgaatcaaatcaatggctgtgggcatcgcgctgcggaaaaatatgatgatgttatttattgggattataactggcgaaaagaaggtggctcgcaacgcatgattgaaattagtaagcgtgagcgattctatcaacaagaatattgcggttgtgtgtattctttacgtgatagtaataaatggcgagaagagacgggtcgtcaaaaaattgaaatcggaaaattgtattatagtgctgattaaaaatagaaaaataaaggtgttgtttcacagaatttgctgaacagcaccttttatttcactattttatcacttcatcttgatcataatgattaatttttaaacgttgaaaataatcttttgtttcttcaatgatcacttttcgcaatccaataagcgcgataagatttgggaaagccatcaaaccatttacaatatcggcgataatccatattaaatttaagtgtaagaatgcccctaaaccaaccaacataatataagctagacgatatagttttacgccacgaataccgacgagataaacaaagcaacgttccccgtagtaacaccaacctaaaatagtcgtgaatgcaaaaaataataaaccgactgttacaatcgttgcaccaattgatgtgcctaaaccttgtgcaaaggcatagtttgtgacggtagcacccgctaattcaggattgttccacgctcccgttaataccaatacaatacctgtcattgtacaaacgatgatggtatctaagaatgtacctgtcatggaaattaagccttgtcgcacaggttcacgagtttgtgccgctgcagctgcaattggtgcacttcctaaacctgattcattggagaaaatgccgcgcgcaacgcctgattgaatcgctttcatcacagtaagccctacggcaccgcctaatgcagcttgtggatcaaaagcactatcaataatcaataaaatcgcatctggtactttttctatatttaaaaggataataaccagtgaagtcgtgacgtataaaatcgccataaacggcacaattaccgatgatgcggttgcaatacgttttacaccgccaagaataattaagccgactaaaagagtcacaataattgcagtaactaaaacaggaatattaaaagtatcttgcattgcatgggtaatcgcattgacctgtgggaatgtgccgatcccgaaaaaggccaccatcacaccaaataatgcaaataattttgctagccatttgatgcctagaccgcgttcaatgtaatacattggaccgccagccataaagccatttttatcgcgaacacggtatttaaccgcgagtaaacattcggcatattttgttgccattcctaacaaggcgactaaccacatccaaaaaatagcaccaggcccacctgcttgtacagcagttgcaacgcccacaatattaccagttccaattgttgctgctaatgcagtacaaagtgcagcaaaagaggaaacgtctccttttccacctttatcttttttgaacaaataacctagtgcgcgcggtaagtagcgaatttgaataaagcctaagcgtaacgttaaatagagtcctgtaccagataataatataagtagaggtgcgccccaaataaagctatcaatagctgaaagaattgactcaattgtcattgtgattcctcgtcgtttaaatcaaaaataaacacgacaagaagacgaaaagatacaatggaaaagaaagtgcggtaaaaaaatgaataatttccacacttacaatagattgtcttttgcccctgtccttttgcctgagcgtttgaaaaacgattaaaaaattaaccgctcttttgcgccttcggcgtccatttctaaaatggatctctccaagggttcgtccagtaacagtccctgccatcgcacctgaaagattttacatcgtcggtgtggggtcaattccccgctctccagctaccttcatccgaactcacttttcattagatactgaaaagtgtgcgaattctaacaaaacaggaaatgaatttcaaaaaggaatttttatgtagaaaaatcactttattcaatatctccacaaaaacgatagccttctccatgtatagtcataatgatatttggagtatttggatgatcttcaaaatgttttctgatacgtcgaattgtgacatctacggtacgatcctgaggttttaactctcgtcctgtcatttttttcagcaattcttcgcgcgtttgcaattttcctggattttcacagaaatgtaacattgcacggaattcactgcgaggaagtttgaattcttgtccttctggtgtaattaaactgtggctatttaggtctaatttccaaccattaaaacgatagaattctcgaccaaatgtattttctttttcttgatgcggcattgtgcgatgcaatagattacgtgcgcggatagtcagttctctagggttaaaaggtttggttaaataatcgtcggcaccaatttccagacctaaaattttatccacttcattatctcgaccagttaaaaaaataagaggtaagcttaattcttcacggagttctcttgccaataataagccgtttttacctggtaaattaatatccatcacaaccaaattaatattatgatttgtcaatatatgatgcatttcaacaccattttctgcttcaaatacatcatatccttccgcttcaaaaatccctttaagcgtatttcgagtgacgatttcatcttcaacaacgagaatttttggagtagccattttccatccttatacttattttggcgtatgctatcaaagctatcattctagctgtgcaacattattgtaacaataaaaaagtgcggtatttttttacctgattttcctttttgtgatctaaatcatagttttaggtattcaactttctttgtgatagaatttcgaacatttatatttttacactcaattctatgaaaaaactctttcttttttttacgctgattttcactgcttttgcggctaattcaggtttattcgataaaaaacaaacctttttaaaagtagatgatgcttttgctttttctgctactttatctacagataaaagccagttacaagcccattgggatattgctgatggctattatttgtatcaagataaaattagtgctgagttagtcggtaaatcaaatcctctctctttacatacccaacaggcggcggagttacatcaagatccttattttggcgaagtaaaagtttttactcactcaattgatggcatatttaggggcacatttaataatgctgatgataaggttgaaatcacttatcaaggatgtaccgaaggtttttgctatccgcctgaaactaaagtattaagaattggggatttagccgtttctcaaaagcaaattgtcgaaaaaacagttgaaaaaaataccgcacttttatctgaacaagatcgtttagctgatggtttattccatagtaaatggacaatttttggtttctttttattaggattgggactggcttttacgccttgcgtattgccaatgttaccgttgctttctgctattgttatcggtcagcaacaacgtccaaatatgatgcgagcgtttagtttagcttttctttatgttcaaggcatggctctgacttacactttgttaggtcttgcagtggcagccatcggtttaccgtttcaaatcgccttgcaacatccttatgtgatgatcgggctttctattttatttgttgttcttgccctttcaatgtttggcttatttactattcaattgccaaatagcttacaaaataaattgaatacatggagccaaaaacaaacctcgggtgcttttggcggtgcctttgcaatgggaatgattgctgggctggtggcatcgccttgtacatctgcgccactttctggtgctttactttatgtggcgcaaagtggcgatttattcacaggtgcagcaaccctttatttgctcgcacttggtatgggcgtgccgctaatgttaatcacattgtttggtaataaaattttacccaaatcaggtgagtggatgaacactgtaaaacaaacattcggctttgttatgttggcgttacctgtgtttttactttctcgtattttgcctgaagtatgggaacctcgcttatgggctgggttagcgacagtattttttatttggtttgcgttgcagatgtctaagaacggttttggctatgctattaaaattattagttttgcgttggctatggttactgtacaacccctgcaaaattggatttggcaaactcagactacaacacaaagtgcggtagaaaataagtctgtttctcaggttaaatttaagcaaattaaaaatactgaagaacttgaccgcactttagcggaaaatccgcatttaattgctatgttggatttatacgcagattggtgtgtggcttgtaaagaatttgaaaagctgacgttttcagatccacaagtgcaacagcaatttcaaaatatcttattgttacaagtgaatatgacaaagaatagcccagaaaataaagcattaatggaacgctttaatgtgatgggattgcctacgattttattttttgatcagcaaaataatgaaattaaaggaagtagagtaacgggctttatggatgctgatgctttttctaattggattgaaaagctactttagttattttttacttttggtaaaaagtatttttcaattttaattattgtttgactatccgttaaagattaatatgacgccgttttaattcatctttaaacaaaaggaaagcaaatgaacaatcttgaaaaatatcgcccgtatttcttggcatttttacgtatcgttgtcgcttatatgtttattttacacggcacggcaaaatatttggaatttccaatttctatgactggaggaaatggtgcagtaggcgatccaatgctactagtagcaggcgtaattgaaattgttggttccattttattaatcttaggtttatttacacgccaagccgcgtttattttgtcaggggaaatggcatatgcctatttctttctgcacgtagcaggaaaaggaaacctatttttcccaattgcaaatggcggcgagcttgcattactttactcacttctctttctatattttgtattttctggcgcaggtgcttgtgctttagataataagttttttaaaaagtagtttagttgtagtttcataattttatccttatttttgcccacatttatgtgggcttttttatgcctgaaatttatcgcattttttaccgcactttaagaaattatatttaatcttttctatatttaagcaaacgtttgcgttataattctcatcgcttatttttaactatttaatgaaaggaaaatacaatggcagatcgtccaattcgtcaggctttactgagtgtgtctgataaaacgggtattgtagagtttgctcaaggtttagttaaacgtggtgtaaaactactttcaacaggtggaacggcaaaacttttagcacaaaatggtttacctgtaatggaagtgtctgattacacaggtttcccagaaatgatggacggtcgagtgaaaaccttacatcccaaagtacatggcgggattcttggtcgtcgtggtacagatgatgccatcatgcagcaacatgccattgaaggcattgatatggtcgttgtgaatttatatccctttgctgccactgtggcaaaatctgattgcactttggctgatgcggtagaaaatatcgatatcggtggaccaaccatggtgcgttctgcggcgaaaaaccataaagatgtggcgatcgtggttaataatcatgatttcaacgcaattctagccgaaatggatcaacatcaaaacagcctaacttttgaaactcgttttgaccttgcgattaaagcatttgaacataccgctcaatatgattctatgattgccaactatttcggtcagctagtaaaaccttatcatattgcaaaggaagaagaggcgaatgcgaagtgcggtcaattcccacggactttaaaccttaacttcgtgcgtaaacaaactatgcgttacggcgaaaacgcccatcaaaatgcggcattttatgttgatttaaatgtgaaagaagcgagcgtggctacagctaatcaactgcaaggtaaagccttgtcttacaataatattgccgacactgatgcagcacttgaatgcgtgaaagaatttgacgagccagcttgcgtaatcgttaaacatgccaatccatgtggtgtggcgttaggtaaagatattttagacgcctataaccgcgcttaccaaaccgatccaacgtctgcttttggcggcattattgcttttaaccgtgaattagacgaaaaaacggcgaatgaaattgtggaacgccaattcgttgaagtgattatcgcaccgaaagtttctgctgaagcgcaagaagtcgtgaaacgtaagaaaaatgtgcgtttgcttgaatgtggtgaatggacttctcgttccgaacgtttggatttcaaacgtgtaaacggcggtttattagtacaagatgcggatttaggtatggttggcgtggatgatttaaaagtcgtgagtaaacgtcagccaactgaacaagaattaaaagacttattattctgctggaaagtggcaaaatttgtgaaatccaatgccattgtttacgccaaagacaatcaaactatcggtattggtgcaggtcaaatgagccgcgtatattctgcgaagattgcgggtattaaagcgcaagatgaaggtttagaagtggctggttgtgtgatggcatctgatgcgttcttcccattccgtgatggcattgatgcggcggcgaaagtgggtattcaatgtgtgatccatccaggtggatcaatgcgcgatcaagaagtcattgatgcggcggatgaacataatatggtaatggtattgactggaatgcgacattttagacattaatttatctaactatccccctctttagcaaagaggggaaggggagatttggcagaagtgatttcaagctcatactaaattcaatatcgtttaaatctccccctaaccccctctttacaaaagagggggaattgcaggtaaaaaatagccgcactttttttaaattaggcatatgcaaggactacaacatgaacatcctcatcatcggaaacggcggtcgtgaacacgctttggcttggaaagctgcacaatctccattagcagataaagtttttgtcgcaccgggtaacgctggtactgcattggaacacaaagtagaaaacgtgaatatttctgcgacagatattcccgcattagtgaaatttgctcaagataaacaaattggattaaccattgttggtcctgaagcccccttagtgattgcggtagttgatgcatttcgtgaagctggactaaaaatttttgggccaactcaagcagcggcgcaattagagggttcaaaagcatttactaaagatttccttgctcgtcataaaatcccaacagcagaatatcaaaactttaccgaagtcgaacctgcattggtttacttgcgtgagaaaggcgcgccaattgtcgttaaagcggatggcttggcggcgggtaaaggcgtaatcgttgcgatgacattgcaagaagccgaagatgcagtacgtgatatgctttctggtaatgcctttggcgaagcgggcagccgagtagtgattgaagaatttctagatggcgaagaagccagttttatcgtcatggtagatggtaaaaacgttgaacctatggcgactagccaagatcataaacgcgtgggcgaaaatgatacggggttaaatacaggcggtatgggcgcgtattcgcctgcaccagtagtaacacccgaaattcatagtcgcattatgaaagaagtgatttacccaaccgttaatggaatggcagcggaaggcagtgtttacacgggtttcctatatgcaggattaatgattatgccaaatgggcagccgaaagtgatcgaatttaattgtcgttttggcgatccagaaacgcagccaataatgctacgtctcaaatcagaccttgttgaactctgtcttaaagcatgtgacggcaaattagatgaagtaatatcacaatgggatccacgagcttctttaggtatcgtattggctgcagagggatacccaaaagattaccgtaaaggcgatgaaatcagcggattgcctaaaagtgcggtcaaaaacgagaaagttttcttagcgggtgtcgcagaacaagaaggcaagctagtcacaaacggcggtcgtgtactttgtgtgactgcattaggtgaaagcgtatttgaggcacaacagaaagcgttaaaactggctgagcaaattcaatggtctgggcgtttttatcgtcgagatattggttacagggctgtggaacgagagttgcaaaaataatccatatcattatgatgaattaatttcatttaagtgatgaaaatttaggaatgaaattttaattaagtttttatccataaacagttaaactatctgccataaattacataacaggagaacacaatgtttacaagaaatatgactatcgctgattacgatccagtattgtggcaagcgatccaagatgaaaatcgtcgtcaagaagaacatatcgaactcattgcatctgaaaactatgcgagtccacgtgtgatggaagcgcaaggttcacaattcactaataaatatgcggaaggctatccaggtaaacgttattacggtggttgtgagtatgctgatattgtggaacagttagcaattgaccgtgcgaaagaattatttggtgcagattacgtgaatgttcaaccgcactctggatcacaagcgaatgctgcggtgtatggtgcattgattaatgcaggcgatactattttaggtatggatttggctcacggtgggcacttaactcacggtgcaaaagtcagtttctctggcaagatttataactctgtgctttatggaatcacagcggatggcttaattgattatgaagatgttcgtcaaaaagcattagaatgtaaaccaaaacttatcgttgctggtttctcggcttattcacaagttgtggattgggcgaaaatgcgtgaaatcgcagatgaagttggtgcatatttatttgtggatatggcgcatgtagcaggattaattgcagcgggtttatatccaaatccactaccgcatgcacatgttgtgacaacaacaacccataaaacattgggcggcccacgtggtggtttaattctttcatcttgtggcgatgaagaaatctacaaaaaattacaatcatccgtatttcctgcaaatcaaggtggtccattagttcatattattgcggcaaaagcagtttgctttaaagaagcattagagcctcaatataaagaataccaagcaaatgtaatcaaaaatgcgaaagcaatggttgaggtatttaaacaacgtggttatgatgttgtgtcaaatggtactgaaaaccacttgttcttagtaagttttattaaacaaggattaacgggtaaagcagcagatgcggcattaggcaaagcaaatattaccgtgaataaaaatgcagtaccaaacgatccgcaaaaaccattcgtcacttctggcatccgtgtaggtacgccatctgtgactcgccgtggtttcaatgaaaatgatgtgcgtgaattagctggctggatgtgtgatgttttagatgctttaggcaaagaaaatgaagaacaagtgattgctgaaactaaagaaaaagtattagcaatttgtaaacgtcttccagtttatccgaaatgatttcttttctttcgttgattatatgtttagcggcgattaatatcgccgcttattttttatgggaaattatatgacttatattgttggcttaactggtggcattggtagtggtaaaacaacgattgctaatttatttaccgatcttggcgtacctctagtggatgcggatgtggttgctagagaagtcgtcgcgaaagattcccccttattgtcaaaaattgttgaacattttggggctcaaattttaacggaacaaggcgagcttaatcgcgcggctttacgagagcgagtgtttaagcatgatgaagataaattgtggttaaataatcttttacatcccgctattcgtgaacgaatgaaacaacaactcgctgaacaaactgcgccttacacattatttgtcgtccctttattaatagaaaataaattgaccgcactttgtgatcgtattttggtggtggatgtgagtccacaaactcaacttgctcgttcagctcaacgagataacaataattttgagcaaattcaacgaattatgaattctcaagtttctcaacaagagcgtttaaaatgggcggatgatgtgattaacaatgatgctgatctggctcaaaacttaccgcacttgcagcaaaaggtgctagaattgcaccagttttatttacaacaagcggaaaataaaaatgtctgacgaaatgattgaagtaccttgtccgatttgccaaaaatctgtgccttggataaatgaaagtacttttcgacctttttgtagcaaacgttgccagttaattgatcttggcgaatgggcggctgaagaaaaagcgattccaagtgatactgctgattttgcaatggatccaaatgtgagtgacggatggagcattaaatagagattaacctataggaaaccctatcggttaatttttataagtgcggtgcttttttgaggatttttcctaaaaatgctatgctaaacgtaattttattattctaaaatgtgatttttatgcaacaagattatttaagccaacaacgattctccgctcttcctctacatccgattgtgcgaggtgctttggcaaaaaaaggctttgatttttgtactccaattcaggctttatccttgcctatcagtttaaatggacgagatgttgcaggacaagctcaaactggtacaggcaagacaatggcttttttaacggctacttttcaccatcttttaacccaccaagatcctaatcttaaatatcctcacccaagagctttgattttagcacctactcgagaattagcggtacagattagtaatgacgcagaatttcttgcaaaagcgagtggattaaagaccgcacttgcctatggtggcgatggttatgataaacaactacaagcgattgagcgtggcgtcgatattttgattggtacgacggggcgagtcattgattatgtaaaacaaggcgtaattggtttagatgaaatccaagttgtcgtgctagatgaagcagatcgaatgtttgatcttgggtttatccgtgatattcgttatttattgcgtaaatgccccgctccgcaagctcgtttaacgatgttattttcagcgacgctttcttataaagtgcgtgaattagcatttgaagatatgaatgaccctgaatatattgaaattgaaccagaacaaaaaacaggacatcgaattaaagaagaacttttttatccatctaatcaggataaaatggcacttctcttaaccttaatggaagatgaatggcctgaacgctgtattgtatttgcgaataccaaacatcgttgtgaagaaatttggggctatttggcggctgatgggcatcgtgtcggtttactgactggcgatgtagcacagaaaaaacgtttatcgttattaaaacaatttactaatggttatttggatattttagtggcaacagatgtggctgctcgtggcttgcatatttctgatgtgacgcatgttttcaattatgatttacccgatgatcgagaagattatgttcaccgaattgggcgtactggacgagcaggggaaagtggtgtttcgattagttttgcttgcgaagaatatgcgatgaatttaccagcaattgaagaatatattggccattctatccctgtgagccaatatgaaacagaagccttgcttgaactgccgaaaccgtatcggttgaaacgtgcggtgccaccgcaaggacatacaagacatcgttcttatcacacaaaataggtggcttcagtccacgcgtttatttaatgatgaaaagtgcggttaattttgactgcattttatattcctattttttatatcctcctttgttcatcattcatcttgtgggtttacggcttacctacagataagtattgttacgttttttgttttttaacttgccaaaaaacaaaaaataaataaaatgaacgctcattcatttctgagcaattattgctccttattttactcaaggatcttatgcgacaagctaaaacagacttagctgaacagattttttcagcgacagatcgtttaatggcaaaagaagggttgaatcaactttctatgcacaaacttgcgaaagaagcaaatgtggccgcaggaacgatttacctttattttaaaaacaaagatgaattgcttgaacaatttgcacacagagtgttttcaatgtttatggcaacacttgaaaaagattttgatgaaactaaaccttttttcgaacaatatcgacaaatgtggaaaaacatttggtatttcttacaagaaaatcccactattctatccaatttaaagcaatatgaatctttgccgaatttcaaggatatttgtaaaaacattaaaaattgccgttgggatttattttgtcatcaagcccaaaaagctggcttattagcggaattatctgaagatattctctttttattaagtttgaaaacggcgataaatttagcctctgatgcaaaatttatcgatttcgatcttaagcctgaaattttagaatctgtgattgaacgctcttggcgtgcgattcagaaataattgttgttatttttataacggagctttaaacatgagtcaaactcaacatcaaagaccaaaacgctcacatattttctttatgaaaataattttagtggtatttgtcttaatttttgtcggtgtcatcggttttaatatgataaaaggcgtaatgataagccgagcaattgcaggaatgccagaaccttcaagcccggtaaccgcacttgaagttcaaccgcgtgaatggacgccagttatcaatacaacaggtcttgtgcgtccaaatcaaggcgcaatgctcagtacacaaaatgcgggcgcggtttcacaagtacttgttcaaaatggacaaaatgtgaaaaaaggtgaggtgcttgtggagcttgatagttctgttgaacgagctaatctacaagctgctcaggcacaattatcagcacttcgtcaaacttaccaacgttatgtgggtttattaaatagcaatgctgtatcacgtcaagaaatggataacgcaaaagcggcttatgatgctcaagtagctagtattgaatctctaaaagcagcaattgaacgtcgtaaaattgttgcgccatttgatggcaaagcaggtattgtgaaagtaaatgtgggtcaatatgtgaatgttggaacagaaattgtgcgtgtagaagatactagctcaatgaaagtggattttgctctttcacaaaatgatttagataaattacatatcggtcagcgcgttacagcgacaacagatgctcgcttgggcgaaacattttcagctcgaatcactgcgattgaacctgccattaattcatcaacaggtttagttgatgttcaggctacttttgatcctgaagatgggcataaattgctttcaggtatgttctctcgcttacgcattgcacttccaactgaaacaaatcaagttgtcgttccacaagtagctattagctacaatatgtatggtgaaattgcctatttacttgaaccattatctgaagaagaaaaaggaaaaatgtcaggtaatgaaaaattggatcgtctctatcgtgcgaaacagatcaccgtatttactaaagatcgtcagggtgtttatgctcaattacagggaaatgaagttaaagcgggagataaaattattacaggcggtcagcaaggtattggtaatggaagtcttgtggaatggattaaaaaagacattgtgggtgcagtagagcctgcacataaaacaccactttaatgtatgaggaaatccgaatgaaatttaccgatatatttattcgtcgtcctgttttagcagtttcaattagtttgttaatgattattttagggttgcaagcaatctcgaaattggcagtgcgtgaataccctaaaatgactactacagtcattacagtgagtaccgcatatccaggggcagatgcgaatttaatccaagcatttgttacgtcaaaattggaagaatctatcgcgcaagccgataatattgattatatgtcttcgactagtgcacctagtagttcgactattacaataaaaatgaaattaaataccgatcctgcaggcgcgttagcagatgtgttagccaaagtgaatgcagtaaagtcagcattaccaaatggtattgaagatcctagtgtatcctcttcttcaggtgggagcggtattatgtatatcagtttccgatctaaaaaactagattctagtcaggtaactgattacatcaatcgtgtagtcaaaccacagttttttaccattgagggtgttgccgaagtacaggtatttggtgcagctgaatatgcattacgtatttggcttgatccacaaaaaatggcagctcaaaatctttctgtgccaacagtgatgtctgccctttctgcaaataatgtacaaacggctgcggggaacgataatggctattatgtgagttatcgtaacaaagtggagactacaacgaaatcagtggaacaactcagcaacttaattatttcatcaaatggcgatgatttagtgcgtttgcgtgatattgcaaccgttgaattaaataaagaaaatgataattcacgtgctacggcaaatggcgcagagtccgttgtgttagccatcaatccaacctcgacagcaaaccctttgactgtcgcagaaaaaattcgccctttatatgaaagtataaaaacacaactgccagacagtatggaaagcgatattctttatgaccgcactattgccattaatagctctattcacgaggtcataaaaactattggtgaagctactttgatcgttttagtggtaattttaatgtttatcggttcgttccgtgctattttaattccaatattggctattccaatttctcttattggcgtattaatgctgctacaaagtttcaacttttctattaatttaatgaccttgcttgctttaattcttgccataggtttagtcgtagatgatgctattgtggtgctggagaatattgatcgtcatattaaagcgggagaaacgccattccgagcggcgattattggtacgcgtgaaattgcagtccctgttatttctatgactatcgcattgatcgcagtttactcaccaatggctttaatggggggcattactggcacattgtttaaagagtttgctttaacccttgctggtgcagtatttatttctggtgttgtggcattaacgttatcgccaatgatgagtagtaagttactcaaatccaatactaaaccaacatggatggaagaacgcgtagaacataccttaggtaaagtaaatcgtgtttacgaatacatgcttgatctcgttatgctcaatcgtaaatcaatgctggcttttgcggtcgtgattttctcaacgctcccatttttgtttaattcactttctagtgaattaacgccaaatgaagataaaggcgcatttattgcaattggtaacgcaccatctagcgtaaatgtggattacattcaaaatgcaatgcaaccatatatgaaaaatgtaatggaaacacccgaagtttcttttggtatgagcattgccggtgcgccaacttctaatagctcgttaaatatcatcacattgaaagattggaaagaacgttcacgtaaacaatctgcaataatgaatgaaattaatgaaaaagcaaaatcgattccagaagtgtcagtatcagcatttaacattcctgaaattgatacaggggaacaaggcgctccagtctctattgtattgaaaactgcacaagattataaatctttggcaaacaccgcagagaaattcctcagtgcgatgaaagcctctggcaaatttatttatacaaatttagatttgacctatgacacagcacaaatgacaatttcagtagataaagagaaagcgggtacttacggcatcacgatgcaacaaatcagtaatactttagggagtttcttatctggtgcgacagttacgcgtgtggatgtggatggacgtgcttataaagtcatttcgcaggtaaaacgagatgatcgcttatcgccagaaagtttccaaaattattatttaactgcatctaatggtcaatcagtgccattaagtagtgttattagtatgaaattagaaactcagccaacatcattaccgcgtttcagtcagttaaattcggctgaaatcagtgctgtaccaatgccgggtatatcaagtggtgatgccattgcttggcttcaacaacaggcaaatgataatttgccacaaggatacacttatgatttcaaatccgaagctcgtcaattagtccaagaaggcaacgcattagccgtcacttttgcattggctgttatcatcatattcttggtacttgccattcagtttgaatctatacgtgacccaatggtaattatgatttctgtaccattagccgtaagtggtgcattggtgagcttaaatattttatccttctttagcatcgcaggaacaacattaaatatctactctcaagttgggttgattactctcgtgggattaatcaccaaacacggtatcttaatgtgcgaagtggcaaaagaagaacagctaaactatggtaaaactcgaattgaggcaatcactcatgcggcaaaagtgcgtttgcgtccaattctaatgacaacggcggcaatggtagcaggcttaattccattactctatgcaacaggtgcaggagcggtatctcgctttagtattgggatagtgattgtagcgggattatccattggtactattttcaccttgttcgtcttgcctgtagtatatagctatgtcgcaactgaacacaaaccattaccggtttttgatgaaaataaaacaacccactaattaaaacatagaaaaaacaaaccgcacttaggttatcttacgtaattcgtacttataaatagttgttttatccaacttttttgagcataacctgcataagtgcggtatttttttattctgttaattatataaataatccacttatgttagtctttatttaaagactatttttcagtaaacttagcgaattttgttgaattattaaaattatcacttcaaatctaggaatttattgtggcacatcgagattttgctgcgcgtcgtagctcaaataataagaaaaaaaataagaaaaagaatacaaatgtcttgatttttcttgctttatttattgttctagtttttgttgttggactttatttgttgaaaaatcagaacagtaaggtaagcgtgcagcaagctataacacaacaggaaaaagctcaacctaaaagtgtgttacctaatcgtccagaggaagtgtggagttatattaaagccttagaaacgcgtactgtacctgtagataataatccagcgagtgtagaacaaaatatgcgtttaacagaagaacaacgtcaagttttaattcaaatagaaagagatcaaaaagcggctgatgaagctagaaaactggctgagcaacagagaatagaagatgcaacgagaactcaatccaaaaaaacggaagatatgaaaaatacagaggcagaaatcgtaaaattggaatcaattaaaaagcaagactcacagaaaattgaaagcgcaaaaaaagtagaacaaataaaaacggttaataatgtacgggatagcaagaaatttggtttacaatgcggtgctttcaaaaatcgagcacaagctgaaaatttgcaaggtcgtttacagatgacaggattaaatgctcaaatacaaactaacggcgaatggaaccgtgttcgtgtagcaagttttgatactcgagagcttgcagtacaggcgcaaagtagagctaaaactgttaccgattgtgttgtgattggtatgtaatatatatttattttaatgctgagtaccaaaaggtggttttgcaaaccaaatcacaataagcaatcctaagaatcccatagctgataaccaaaatatttcatttgcgccaataataaatccttgcgatgttatttgttgagcgaggtaagctgaagtttgcgtatcacttaaaccaaattgattcatttgatggtaaaaactttgggaaattgggttataaggattaatgtgttctgttaattgagtgtggtgaacagcttcacggttataccacataaatgtggtcaaagatgttcctacagaacccgctaaagttctcaaaaagttaaataagctagaggctgaagccattttatgctcaggcaagccagacagcgttattgtagtaagtggcataaagaaacaggacaccgctaaaccttgcactaattgtggtaaagctacatcagtaaatgtcattgatggctcgaaagtcaccgctctccaataaaatgttattgcatatacaataaaacttatcgtcactaaaactcgcatatcgatcttataaccgaaacgcccaataatcggtgaaagcaaaattgggaataatccaactggggaagccgcaagcccagcccacgtcgcggtgtaatggaagacttgctgtagcaagagcggaattaataccacagaacctaaataaatcaaaaaggctaaactggtacataaacaccctacgctaaaattacgagaatggaaaagcgaaatatctactacaggattatcatctgtcaattcccaaataaccaaagcaatcaggcaaataacagcaacaacagctaatataatgatttcattagaattaaaccaatcttgctcacgtccctgatcaagcattaattgcaaagatcccacgcctaagacaagtaagactaaaccgactttatcaataggttgatgaacaatttcactttctctgcttcccaaaatcttccagctgattagcacaactaacaaaccgatcggaacattgataaaaaagatccatccccaatggatattatcgctaatccatccgcctaaaattgggccaaaaataggtgcaaccacaatagtcattgaccaaaatgccaatgccattccgcgtttttctggtgaataattatttaataataaactttgcgaaagagggatcactgggcctgcgacagcaccttgaatgactcggtaaataattaatgcttcaaggctatccgcaatcccacagagccaagaagagacaacaaataaaaaagttgagactaaaaataaccgcacttcgccaaaacgttttgctaaccaacccgttattggaatagaaatcgcatttgctaccccaaaagaagtaattacccacgtaccttgactaaaagatgcgccaagatcgccagcaatagtaggaatcgccacatttgcaatggtagaatctaatacctgcataaaggtggcgagagataaagccagcgttaataaaatcagcgcgccaccttgaataggcgggtatttttttgcggaattgtccataacgccgccttaatggctgttttgctgaatgatagattcaatcaaattttctaccgcactttcatcatatttaagtgtatcagtagaaaataacgttttcggttctgctttttctcgtagcattgcgcctgatgaatctgaaattcttacttttgccgttgcagaaagaccaattctcaatggcgtttctgtaaattgttgtggatctaatttaattcgcacaggtacgcgttgcaccactttaatccagttacccgtagcattttgtgaaggcaaaagagaaaatgcattgccagtccccatttcaataccatttatcacgccatcaaattctttatttttaccgtataaatcaaaatggatttttactggctgaccaatgcgcatattcgttaattgggtttctttgaagttagcttctagccacatttgttcattagataccaccgccattaatgcgccacccactgaaacggcttgcccaacttgaacattacgacgcgccacatagccatcaattggacttctaatttttgtacgttgcaaatttaaccaagcctgtttaagcgagtttatcgcattctgtatttgcggttgttcacgtaatggaacgttactcaataaagcctgattagcagccaattgatttttagaggcatttaaatttgctttggcaagctcgacagcttcttttgcgtgttggaaagattctttatcaatcgcacccattttttcaagttgaactcggcgagccaaattgccttgagcttgagctaaagaaatttcattggcgtgcacagctgattgcaattgttgcacagtgaaaccgagttgttctacctgacgtacagcattggagagattgcttttcgcttgttcaaaactaagtttcgcattcgtatcatccaattcaactagaatatcacctgcatggactttatccatattgtcagcattaatcttcgctacattacctgcaacttgtgatgataccattacttgatttccacccacataagcatcttctgtttcttcaaaatccttcaagaagaaaaaccaatacaaagcacaagcaataccaataataagaaggagaagaataaaaatgcttaagccttttttacggtcagttttatttgatacagatttagttgatgggttttcagttgcaatttgcgtcataatgccttccctaagctgggataatgtttaaaaatgggatatttaaaactatcaaaaataaaatgaaaggtcattatgaaactttaaaaaggggaactcaagggaaatcatcatctctttattttctagattaatgaatattctaaagatatagtctcattaatttgatttattttcgtgtaagaatcaaaaatcgacaatcatagcgattttgttcatctgccttacgatattcatcaaattcaatttcccactcctcccaattcaattgagggaaaaaagtatcaccatctagttctgtttgaatttgagtaaggtataacttatctgctttgggtaaatattgtttgaataactctcctccaccaatcaacataatttcatcaaaatctctgacaaaattgaccgcactttcaaagctatctttccatatcacaccttcgtgttcaaaaagctggcgagaaagtacgatattggtacgtttaggtagtggacgaccaatactttcaaaggttttacgccccataatgacaggtttaccagtggtgttctgacgaaaccaagctaaatctgcaggcaagtgccaaggcatttggttatctttaccaatcacattatttaatgttgtcgccacaattaaactaaatgtcataaatccccctaaaatttgccgttactatacctgatattaagtgatttttcattgatttagtgataacgttaatgccaattttaagaacttggaaaggattatgaacaaaaaaacaatcgttgtgaaattcggtacaagcacgctaactcagggttcgccaaaactgaattcaccgcacatgatggaaatcgttcgtcaaattgcacaactgcataatgatggatttcgtatagtgatcgtgacttctggtgcgattgcagcgggtcgccattatttaaatcatcctcaattaccacccactatcgcctcaaagcaactgcttgcagcggttggtcagagccaattaattcaggcttgggaaaaattatttgctatttatgatatccatatcgggcaacttttattaacccgtgcagatattgaagatcgcgaacgttttttaaatgcgcgagatactttacacgcacttttagataaccacattattcctgtgattaatgaaaatgacgcagtggcgactgcggaaattaaagtaggtgacaatgacaatttatcggcattagtcgctattcttgtgcaagcggaacagctttatttattgactgatcaacaaggtttatttgatagtgatccgcgtaaaaattctgaagcgaaattaattccagttgtagaacaaatcaccgatcatattcgatcaattgcaggaggaagtggtacaaatcttggtactggtggaatgatgaccaaaatcattgctgccgatgttgcgactcgctctggaattgaaaccattattgctccaggtaatcgcccaaatgtaattgcagatcttgcttatgaacaaaatattggtacaaaatttattgcacaccaatctgatcgattagaaagtcgcaaacaatggcttttcgctgcgccatcggcaggtattattaccattgataacggtgcgcaaaatgccattcttgaacaaaataaatctttattacccgctggtattattaacgtgaaagggcgtttttcgcgtggtgaagtagtcaaaatacgcactcaatcaggtaaagacattgcgctgggtatgccacgctataacagcgatgccctgcaattaattaagggcagaaaatcagcagacattgagaatgttttaggctatgaatatggcgcagtggcaatgcatcgtgatgatatgattattttgtcataatgtcctttggttgataaaagcactgatttatgaaacaatcttgagctatttttataggaaaaatttaaggtaaaacgatagtgatcgattttgatggctaccgtccaaatgtgggtattgtgatttgtaatcgcaaagggcaagtgctttgggcgaagcgttgtggacaaaattcgtggcagtttccgcaaggtggcattaatgataatgaaagtgccgagcaagcgatgtatcgcgaactacacgaggaagttggtttacaacctaaagatgtgcgtctgttatatgtttctaaacattggttacgctataaattgccaaagcgtttattgcgttatgacagcaagccgatgtgtattgggcagaaacaacgctggtttttgctacagcttgttagcgatgaaaaaaacatcaatatgcaaacaactaaatcgccagaatttgacgggtggcgttgggtaagtttttggtatcctgttcgtcaagttgtgtcttttaagcgagatgtttatcgaaaggtaatgaaagagtttgcttcgatactatttacggacaacccactaatattttccgcatctcgtgaagcaaattcacagcattattcggcaaacaaaaaatattctcagacaaaatacacgaaacgccatttttataaatcaagaggccaataatgttcacttttattcttctttgtttacttgttggtgcattagcgggttttcttgcaggattatttggtatcggcggtgggttagtaattgtgccaacgttagtgtatttactgcctattgtagatgtaccagagtctttgttgatgtctaccgcacttggaacatcatttgctaccattgtgattactggcattggatcggcacaacgtcatcataaattaggtaacatagtctggcaggcagttcgcattttagctccggttattatgttttctgtttttatttgtggtttattcattggaagacttgatcgtgaaatttctgccaaaatttttgcttgcttagtggtatatttagccacaaaaatggtactttcgattaaaaaagatcaagttacaacaaaatcacttacccctctttcttccgtaattggcggtattttgattggtatgacatctagtgctgcgggaattggcggtggtggatttattgtaccgtttttaactgctcgtggcattaatatcaaacaagctatcggttcttccgcattttgtgggatgttattgggcatatcagggatgtttagttttatagtgagtggttggggaaatccattaatgcctgaatattcgctcggttacatttatcttcccgcagtgttaggcattactgccacttcattttttacttccaaattaggcgcgagtgcaaccgctaaattgcctgtttcaaccctaaaaaaaggtttcgcccttttcttaattgtggttgcgatcaatatgtttctgaaataaggaaaattatgaattcaaattatttacttcttccccactttgatccgagtatttttacgctcggcgatagcaatatcggcttacgttggtatggtttgatgtaccttttaggttttgtttttgcacgttggcttgcggttcgccgtgctaatcgcccaaatagcggttggacagtagatcaagttgataccttacttttcaatggttttatgggggtgtttattggcggacgtgttggcgatgtatttttctataatctcgatcatttcttacaagaaccactttatttattccgcgtttgggaaggtggaatgtcgttccacggtggcttaattggtgtaattgttgctatgatttggacatcctattcacaaaaacgtaatttttggcaaacggctgattttgttgcgcctttgattccgtttggtttaggtttaggcagaattggtaatttcattaatcttgaactatggggacgcgaaacgaatgtgccttgggcaatgattttcccgaatgatcctcttttactgcctcgtcatccatcacaactttatgaagcctttttagaaggcctggtgttgtttgcgattctgaatatttttattaaaaagccacgtccaatggcttctgttgcgggtttattcttaattggttatggtgtcttccgttttattgtggaatatgtgcgtgaacctgaagttgaaaatttctttgggattattacacgagggcaagccctttgcttgccgatgattattggtggtgctttcattatggcttgggcttattcacgcaaaagtgcggtcataaaataggagatttttatgaagcaatatcttgagctttgtcgccgcattgttagtgaaggggaatgggttgccaatgaacgtacaggtaagcattgcctcacggtcattaatgcagatttagaatatgatgtggcgaataatcaatttccgctgattactacccgtaaaagttattggaaaacggccattgctgaatttctaggttatattcgtggatatgacaatgccgctgatttccgcgcacttggcacgaaaacttgggatgctaatgcgaatgaaaatgcagcttggcttgcaaatccgcatcgtagaggcgttgatgatatggggcgcgtatatggtgtgcaaggcagagcatggcgtaagcctaatggagaaaccatagatcagctacgtaaaattgttaataacttaacgaaaggtattgatgatagaggagagattttaactttttttaaccctggggaatttgatcttggttgtcttcgtccttgtatgcacacgcatactttttctcttgtgggcgatactttacatcttactagttatcaacgttcctgtgatgttccgcttggattgaatttcaatcaaattcaggtgtttaccttcttagtgcttatggctcagatcacgggcaaaaaagccggcaaggcatatcataaaattgtgaatgcgcatatttatgaagatcagcttgagttaatgcgtgacgtacaacttaaacgcgagcctttcccattaccaaaattagaaatcaatccagatataaaaacccttgaagatttagaaacttgggtcacgatggatgattttaaagtcgttggctatcaatctcatgagccaattaaatatcctttttccgtctaatggatgcagcaaaagtgcggtcagaatttgacgagaaaatgatgcgctacgcccttgagcttgccgataaagcggaagcgttaggtgagattcctgtgggggctgtgctggtggatgacgctggaaatattattggagaaggttggaatctctccattgttcaaagtgatcctactgcacatgctgaaattatcgctttgcgtaatggcgcgaaaaatattcaaaattatcgcctactgaatagcacgctttatgtgacattagagccttgcacaatgtgtgcaggggcaattttgcatagccgtattaaacgccttgtgttcggtgcatctgattataaaactggcgcgattggatcacgttttcatttttttgatgattacaagatgaatcatactttagagattacatctggcgtattggcagaagagtgtagtcaaaaattgagtacattttttcagaaaagacgcgaggagaaaaaaatagagaaagcattattaaaaagtctgagtgataagtaattctttattttttcttatatttgaaacttaaaatccaggattgatcgttatctcaaatcctgttactttcggaaattcttcttgaatgagtttcaacaattctatctgtctgaataaaattccttggcgaacgatcgcatttgctgtttcaataaaaattgagttatctgtcatattaccaatacgaaatttgccgtgaaattcctgtggaaaaatgcggttaaatttttgattaagttcattgatggcaagaccttttttcattattttggcaaagggagattgctcaagtacatccataatattgactgctttttgataacgttcagccttgttttccataaagtcagcccccagtaaatgacatcagtttagatttccgctacaatacacgcaattttcataataaacaatgagacgaatgatttcaggcactgtcaaaccgaatttttggtcgcgattacttttaagtatcatcgcgatttttgctttgcctaacgcacaaagttttgaaaatcaaaataatacggaaaattattcctcaagtgtttccattcaacaagcgttggaaacggtaaaagtagcacgtgaagtgcaacgacaagccattcctcaaccttcaatttcccgtcaaactgaaaaacaacctaaaattcaaccgcacttttttgctgaagtgttgaatcttagtgcgccaattcgagcaggccccttgcttatttaatttttctgttttttatgaagagtattgctattgaaatagcgatattttaaaaaattattgtgcatgaaataaagtatttcataagcatttaactatttaacttatatatttaaaaagagaaattatgagcattttaacaagaatttttggtagtcgtaatgaacgcgttttacgtaaattaaaaaaacaagtcgtaaaaattaataaaatggagcctgcttttgaggcattaagtgatgatgaattaaaagcaaaaacacaagagtttcgagatcgtttaagtggtggcgaaactttgcaacaaattttaccagaagcattcgcaacggtacgcgaagcaagtaagcgtgtgcttggtatgcgccattttgatgttcagcttatcggtggagtggtattgaccaatcgttgtattgcagaaatgcgtactggtgaaggtaaaacattaacggcgactttgccttgttatttaatcgcacttgaaggtaaaggcgttcatgttgtcacggtgaatgattatcttgctcgccgagatgcagaaacaaaccgtccgttatttgaatttttgggtatgagcgtaggcgtaaatattcctggtttatcgccagaagaaaaacgtgcagcttatgcggcagatattacttatgcaaccaatagtgaacttggttttgattatttacgtgacaacttagcccactcaaaagaagagcgtttccaacgtactttaggctatgcgttggtggatgaagtggattctatcttaatcgatgaagcgcgtacgccattgattatttctggtcaggcagaaaacagttcagagctttatattgcggtaaataaattgatcccaagtttaattaaacaagaaaaagaagatacggaagaatatcaaggagagggcgatttcactttagatttgaaatctaaacaagcgcatttaaccgaacgtggtcaagaaaaagtagaagattggttaattgcacaaggtttaatgcctgagggggactctttgtattctcctagtcgaattgtattgcttcatcacgttatggctgcattgcgtgcgcacacattgtttgaaaaagatgtcgattacattgtgaaagacggtgaaatcgtgattgttgatgaacatactggtcgtacaatggcggggcgtcgttggtcagatggtttgcaccaagccattgaggcaaaagaaggggtggatgttaagagcgaaaaccaaactgttgcgtcaatttcttatcaaaactacttccgtttatatgaacgtcttgcgggtatgacggggactgcggataccgaagcatttgagttccaacaaatttatggtttggaaactgttgtaattccaacaaatcgtccaatgattcgtgatgatcgcactgatgtgatgtttgaaaatgaacaatataaatttaatgcgattattgaagacattaaagattgtgtagaacgccagcaaccagtattagtggggacgatttcagtcgaaaaatcagaagaattatctaaagcgttagataaagcaggtataaaacacaatgtgttgaatgcgaaattccaccaacaagaagcggaaatcgtggcagaagcaggatttcctagtgcagtgactatcgcaacgaatatggcggggcgaggtacggatattattcttggcggtaactggaaagcgcaggctgccaaattagaaaatccaactcaagaacaaattgaagcccttaaagcagagtgggagaaaaaccacgaaattgtaatgaaagcgggtgggttgcatattatcggtacagagcgtcacgaatctcgtcgtattgataaccagttgcgcggtcgttctgggcgtcaaggtgaccccggttcttctcgtttctatctttctttagaagatggtttaatgcgcatttatttgaatgagggtaagctcaatttaatgcgtaaagcgttcacggtagcaggcgaggcaatggagtcgaaaatgttggcgaaagtgattgcatctgctcaagcaaaagttgaggcgttccattttgatggccgtaaaaacctacttgaatatgatgatgtggcaaatgaccaacgtcatgcgatttatgagcaacgcaatcatttgcttgataatgatgatatttctgaaactatcaacgctattcgccacgatgtgtttaatggtgtgattgatcaatatattccaccacaatctttggaagaacaatgggatattaaagggcttgaagaacgtttatctcaagagtttggtatggaattaccgatttctaattggttggaagaagataataatcttcacgaagaaagtttgcgcgaacgcattgtggaaattgcagaaaaggaatacaaagaaaaagaggctttggttggcgaagacgctatgcgccattttgaaaaaggtgttatgttgcaaaccttagatgaactttggaaagaacacttagcttcgatggattatttacgccaaggtattcatttacgtggctatgcgcaaaaagatccaaaacaagagtataaaaaagaatctttccgtatgtttacggaaatgttggattctttaaaacaccaggttatcacgactttaacccgtgtacgtgtgcgtactcaagaagaaatggaagaagctgaacgtgctcgtcaagaaatggcagcacgtatcaatcaaaataatttacctgtggatgaaaatagtcagacaactcaaaattcagagactgaagattattcagatcgtcgcattggtcgcaacgagccttgtccttgtgggtcgggtaaaaaatataagcattgtcacggcagtcgtgtggcacgccagtaatgaacaatcaaagtgcggtgatttttcaccgcacttttttcatacctctacattggatagaaaaatggataaaaaaattatacaagttgctgcggggattattcgtaatgaatttggtcagatctatttaacgcagcgtttagaaggacaggattttgcccaatctttagaatttcccggtggaaaagtagatgcgggagaaaccccagaacaggctttaaaacgtgaactggaagaggaaataggcattgttgcgttaaatgcagaactttatgaacgttttcaatttgaatatccaacaaaaatcatttcttttttcttttatctggtaaatgaatggattggcgaaccttttgggcgagaggggcaagaaggtttttgggttgagcagctcgcattggatgcaggacagtttccccctgcgaatgcaaaattaattcatcgattactaaatgaaactcacaatttcatataaaataaatgtggtttaaagttatgttaaaagatttagtatgatttatcacatataactttttaatatactcgccaaaatatttgtattttttgcattattggagtcactatgtctcaacttgccaatccagaactgatgaaagtcgttattttactcgcatctagcgtaacaattgtgccgttatttaaaagactcgggttgggtagcgtgctaggttatttagtggcaggttgtttgattggtccatctgtctttggcatagtgcaagatccaacagctgtggtacatttagcggaattaggtgtggtaatgtttctttttattatcgggcttgaaatgtatccagaacgcctttgggcaatgcgtaaagctatttttggcagaggtttgttacaagttggattatgtggttgcttactcactttttcgggtatttatttattaggattaacaaaagaagtatcatttatcgctggtatgggtttcacgctttcctctactgctattgtaatgcaatcactagaagaaagggggcttacttctacgtcaaaaggacaacgcgtaatttcgacattaatttttgaagatattgctattgtaccacttttggcttctgtcgcttttcttgctccccattcgaaagaagcgacaccacatactgattgggtatcaattggtatagcattaagtgctgttgtggggttaattgtgactggaaaatggctaatgaacccactatttcgtttaatttctaaagcacgtattcgtgaaatgatgacagcgggcgcattattggtcgttttaggtgctgcattagcaatggaaattggcggactttcaatggcaatgggcgcgtttgttgctggtgtgatgatgtctgaatcagcgtttcgccatcagcttgaagcggatatagaaccatttcgcggcttattactcggattattttttatgggcgtaggaatgtccttagatttgcatttagtgtttaatcattggatcttgctacttggaattgtttttctttatatacttggaaaagccagtgctgtttatattattgcccgaattacccgtcttgatcatcgagaagccataggacgaatgtctttgatggcacacggtggcgaatttgctttcgttcttttttcagctgcagcaactgcggaagtaatcagtaatgaagaacaagcgacattcactgctgcagtgattatttcgatgcttttttcgcctattattgctcaaattgctcgcaaacttatacagcgtacagagcctaaaaatcttgatcaacttgatgaaaatgatctagacagcatcggggatttggaagataacgttttagttattggttttggacgttttagtcaaattgtctgccaaacattattgattcgtggaattagcgtttcagtgattgatcgcaatatcgaaaatatccgtgctgccgcaaagtttggttttaaagtttattatggcgatggcattcgattagatgttttacgagccgcaggaattgaaaaggcgaaatgtgtcgtattaggtattaacgatacacaaagaattgaacatattgtcagtcaaatgaaagaggcttatccaaatttaccgattttaacccgaacttatgacagaaaaacaacagttagtttgattaagcaggatgtagattttattgtgcgtgaaacttttgaatcagcaattacacttagtcgagcaacattgatgaaattaggtattgataaaattgaagcggaagaaattattaaggaagtacgaacattggatcaagaacggttaaatgaagaagttttacacggtttttcgaatgaaatagtaaaaaaatattggacaccaagaccatttattaaaccgcatcttgatacaaaagcattaaataaagaaacagaagaaattctaagtgagaaaattgaagaagaaatatcaaatgatcattcataaaattattttttatctttagtgatattttttatctataaaaattttaacttctcgtttaagtatttacttttgagtgatttaaatcacgtaaatttttattttaaggcaataaatgaataataaaattagtgtttatgataaagataatttctttgagctttatcagaaactccgtgtaaatccaattagcctcaatgaaattatcgaaaagcccaccatgctttcattgttgcctaatttaaaagggaagaaattactcgatttaggctgtggtacgggagggcatttacaactttatttagaacgaggggcggctaaagtaattggaactgatctttccgaaaaaatgctcgaacaagctgaaaaagatcttcaaaagtgcggtcaattttcagggcgtttttccttatatcacttaccaatagaaaaattagctgagttaccagaaagtcatttcgatgtgattactagctcttttgcctttcattatattgaaaattttccgacattattatcaacgatccatgacaaactctcgtctaatggcgcattaattttctcacaagaacatccgataactacctgccataaagagggagaacgctgggaaaaaaatgacaaaaaacagcaagtcgcttatcgtttaaatcattatcgagaagaggggaaacgcaatagaaattggttcaaacaaccttttcaaacctatcatcgaacaacagcaacaattatcaataatttaattcatgcaaggtttcaaatcgagcaaatggaagaacccatgcttgctgaccaaccgcaatggcataatgaatttaaagatttgtcgcatcgaccaccattgttatttatcaaagcaagaaaagtggagaaataaacaaaataaactggtttttaaccgcactttatggtataaatcgccccgctgtttttgcctttcaaaagcagttttttaattactaacaacacacacatattaacaaggcttaatcggggtgccaaacggtcgattagctgatatgtggaggctcaaccccaacaaaaggaaaatattatggcacaagtttcaatgcgcgatatgatcaacgcaggcgtacacttcggacaccaaactcgttactggaacccacaaatgaaacctttcatttttggtgctcgtaacggtgttcacatcatcaatcttgaaaaaactttacctttattcaacgaagctttagcggaattaactcgcattgctagcaacaacggtaaagtattattcgttggtacaaaacgtgcagcgtctgaagcagttcaagcagcagcattagattgtcagcaatattacgtaaaccaccgttggttaggtggtatgttgactaactggaaaaccgttcgtcaatcaattaaacgtttaaaagatttagaaacccaatctcaagacggtacttttgataaattaaccaaaaaagaagcgttaatgcgtagccgtgagatggaaaaacttgaattaagccttggcggtatcaaagatatgggcggcttaccagatgcgttattcgttatcggtgcagaccacgaacatatcgctgttaaagaagcaaacaacctaggtattcctgtatttgctatcgttgatactaactcaacaccagctggcgtagatttcgttatccctggtaacgatgatgcgactcgtgctatccaactttacgtttctgcagctgcagcagcggttaaagaaggtcgtggtaacgaagctcaagttgctgaagaattagcagctgacgcagaataatttaagttttgcaataaggcgaagcccttaataatcaagcgattaattggcataggggctaaaatttagcccctatatttttatctaaaagtgcggtcaaaataaaccgcattttcgacagaggattttaaaaatggctgaaatcacagcatcattagtaaaagaacttcgtgaccgtactggcgcaggtatgatggaatgtaaaaaagcattagttgaagcaaacggtgatattgagttagcaatcgacaatatgcgtaaatctggtcaagctaaagcagctaaaaaagcaggccgtgttgcagctgaaggtgttatccttgctcgtgtagaaaatggtttcggtgtattagttgaaatgaactgtgaaactgacttcgtagcaaaagatgcaggtttcttaggtttagcaaacgaagtaactgatttcgcagcagcaaacaaaggtaccactatcgaagcattacaagcgcaatttgaagaaaaacgtgctgcattagttgctaaaatcggtgagaacatgaatattcgtcgtgttgcttacttagatggtcaagtaattgcacaatacttacacggtgcaaaaattggcgtattagttgcgggcgaaggttctgctgatgaactgaaaaaagtagcaatgcacgtagctgcatctaaacctgaattcgtgaacccagaagatgtatctgctgaagtggttgaacacgaacgccaaatccaaatcgatattgcgatcaactctggtaaaccaaaagaaatcgcagagaaaatggttgaaggtcgtatgaagaaattcactggtgaagtttcattaacaggtcaagcatttgtaatggatccttctgtatctgtaggggatttcttaaaatcagtaaatacttctgtttctaacttcattcgtttagaagtaggcgaaggtattgagaaaaaagaagaagattttgctgctgaagttgcaaaaatcactggcggtaacgcataattctttaacgataaaaaatgtatgcttgtaagcccaatttaaagttgggcttatttatttttaaaagaatttcaacttatttcgttaagtaaattttatacacataaaaatctgcattttaatcagttattaaacttgtaaaatgcagattaaatgatggggtatcaattaagaaattttcttttctaatgcttttaagcgtttatgtatgccatcaatgcctaatgttagagctgccgttttacgccattctctattcgtttgcaatggaataccagaggaatatacgcccggttctgtgattggacgcataaccattcccattccagtaatggttactttatcacaaatttccatatgaccattaatcacacttgcaccaccaattaagcaatagcgaccaacagttaagctacctgccataataacgccacccgcaaccgctgtaccagtgccgatatgaacattatgtgcaatttgacaaaggttatcgataataacgttatcttcaataatcgtggcatctaatgcgcctctatcaatacaggtattcgcaccaatctcaacgttattaccaattattacttgccctacttgtggaattttaatccaacgaccacgatcatttgcataaccaaaaccatcactaccgataactgttcctgattgaattaagcaattagctccaatctcaacgttatggtaaacagtgacattagcccagagctgagtgcctgaacctatcttggtatttttaccaacaaagcaatttgcaccaatgatcacgttatcacctagtacaacaccttcttcaatcactgcgttcgcaccaatagatacattttcgcccaataaaacaccatcaaaaatgaccgcactttttgcgattccttgtgccgcttttggcgtgctatccatatattgcgctaaaattgcgtaagccacataaggatctttaacaataagtaaattgctttctggagaacagtgttcaacatcctcttcagaaacaaccaaaatccctgctttagaatctttcaataatgcacgaaattttacgttagaaataaaagtgagttgatttgattgggctttatcgagaggcgcgatattctcaacaacaacatcggcgttaccgcgaacggtagcgccgatttgagttgccaattcttgtaaagaataggatttttgcattatgagaacctattattttttctcttgtgctttttcagaagcagggatagattttaatacttcttcagtaatatctttaccctctaccgcaaatacgactgaatttgcatcaagcacataagtataaccttttgcttttgctaaattatttgtcgcagtttgaatgctatctaataatttaccacgttcttcagcttgacgtttttcattttgagcttggaattcttgaacttttttatcttgttcttgcattaatttttgtaattcagcatcttcagccgcacctaatttattaatttcctgttggcgtttttgaatatcagcttgacgtaagcgaggtgcatctttttctaaagccgcaacttttgcttctacttttttacgagcagcagcaattttatcatcaacttcttttttgcttgctgctaatttctcagctacaggtttaaattcagcatcaagtttatctgctaccgcttggcgatctgggtgatgttgaaaaatataacctgcattaatgaaagcaattttttcttcagcggaagcatagcctgaagcaagtgcaatacctaaagcaagtgcggttacttttgcgatgtttttcatttgataaatatccttaattaaatgatgggtttaatattttctctgcccaattaaattaggcagagaacgttgtttttgagttctgatgaagaaaaaagttcaatttattagaaagaacctccaatactaaattggaactgttcgacatcatcattttcatattttttaattggtttggcataagagaataccaatggcccaataggagattgccattggaatccgacacctgtagaggcgcgaatacggcttgatttgccataatcaggcaatctttttaatacatcgctctctaatccatttttatctgatttccatttagtattccaaacacttgccgcatcaacaaataaggaggttcggaccgtattttggctcttatcgctcacaaatggagttggcacaattaactctgcgctagctgtagcgattgcattaccaccaatcacatcagaacttatcttcttaaaagtaccagtaccactaccattaccatattcggcataaattgcgttaggtccaatactaccataagcaaaaccacgtaatgaaccgatgccacccgctgtataagtttgatagaacggtaaacgcttgtttccaaaaccatttgcatatcctgcagatgcttttgcagatacaacccagaggtgatctctgtctaatgggtagaaaccctgtacatctgcacttagtttgtagtatttgttatcagaacctggaatagtaactcgtccaccaagacttgctttaacccctttagttgggaaatagcctctattaaggctgttatagttccaaccaaaagaaaaatcaaagtcatttgttttaatgccattacctttaaatttcattgattgaatatataaattacggttatattctagagcaaagttactaattttattataggtatgacctaatcctacataataggagttattttcatttacagggaaacctaaagtaacattacttccgtaagtcgtacgcttatagttagaggatgtatcacttttagagttatcgtagttttcaaagaaaacatttccaccaagacttacaccatctttagtaaaatagggctcggtataacccaaattgacactcgtaccataatcatttttcgtaccagctatacttactgccgcccctgttcccaagaaattatcttgtttaacacttgcttgataactaataccactctctgtaccgtaaccaataccaaagttgatactacccgtgttacgttctttgactttatatacgacatccacttcatcattactaccattgataggatcaattcggttttcgactgtttcgaagaaacctgtacgatctaagcgaatttttcctaactcaactaattgtgaattataccaagttccttcttgttggcgcatttcctgacgtaaagtgctatcagcagaaacggtatttccttcaaagcgaagttggcgaacagttaaacgtcgtccagcatcaacaacaagggttatcgctaatgttttatttgcatcatcaaaatcaggtactgaatttaccgttgcgctaccgtaaccgcgttctccaagttttgctttaattgcattttctacatctgcaatatcactacggcggaaagtatcatttaaatgtaatgctgaaagtaaaggttcaagctcggcagacatacctcccagattacctataatgcgtgcactacgaaggtcatactgtaaaccttcatttacatcaatggttacattaacttttgttttttcatcatttagctgaacatccgttttagtaatttgtgctttggcatagccattatttaaataataatcacgaattgactgcaaatctttctcgaattgcgcaccttcaaatttatttccccataatttccaccaagaatcaggttgtaattccatttgttcttgtaatgtactgctactaacagattcgttccccttgaaagttaatgatgccaattttgctttatcatcttcattgatttgaattaaaatttcagcgcgattatttggtagcgtattgacaataggttcaactgttgcgttatagcgacctacacttgcatagtgctcttttacacttttggcaaattcatttaatttttctcgaattaaaacatcgccaactttaaacccgttagcatctaagttttgtttaagtgcttcagtgggaataacagagttacctttgattttaacatctgaaatgatcgatttagccacaacgctaacaacaagcacatcgccttcttgatgcgctttcacatcatcgaatcgaccacttacgaataaagagcggacaatattagccacatcattgtcagtcacacgctgaccggcacgaacaggtaaacttgctcggatttgttgttctaagtcaccttgaacaccatccacacgaatatcttttgccacaaaaggtgcggcaaacacagtcgttgtcgtaccgaataataaacttgcgattagaagttttttcatcgattgtatcctatataaattatagacgtaaaaaatcattaaataatgcaaacaccgttaagcttaataacagtgctgcgccaattcgataacagatgctttgcacccgctcagaaacaggttttcctttaacagcttccattgttaaaaaaactaaatgaccgccatctaatactggtaatggaaataaattcataatccctaaatttacactaatcagtgccataaaacttaaaaaatacaccaatccaatatttgctgatgcgccagcaccttttgcaatagaaattggcccacttaaattatttaatgacaaatcgccagtaagtaatttccctaatattttcaaggttaaaagggaaagctgtcctgttttttcaatgcctttttgtaaagattcaagaataccatattttaattcagtacggtattcatccgctaattttgtcaaggttgggctaaccccaacaaaccatttgccattttgattacgcactggagttaggactttgtcaaatgtttctccattacgttcaatttttatagtaaaagttgtgccttgttcgacctgttttataaaatcttgccaaggaagtgcggttaaattttctgttaaaattttatcaccgatttgtaaactagctttctcagcgggagaattttgaacaactttagaaagcaccatttcaattttaggacgcataggcataatccctaatgcctcaaaagcactttctttttcaggatcgaatatccaatttgtaagatttaaagtccgttgttgttcaatattagaattgaaaggagaaaggctaatctcaacattaggctcccccatttttgttgcaagtagcatattgatggtttcccaatcttgagtttcttcgccatcaaccgctagaatttgtgtattaggttcaatgtgagcttgtgctgcgatggaacttggtgttattgattcaatcactggtttaaccgttggcattccataaaggtagatgatccaataagcaaaaattgcaaaaataaaattagctaaagggcctgcaataattacaaatgaccgttgtaatacgcttttactgtcaaatgcttgtgatttttgctcagcaggaactacttcattacgtccatcaagcatttttacatagccgcctaaaggaatcattgaaatcgcaaattctgtaccatatttgtcaatgcgtttccaaattacttttccaaaaccaatggaaaaacgatggacttttataccgcactttctcgctgcccaaaagtgaccatattcgtgaacggatactaatacagcaatagcaatgataaaagaacctagtgaccacaaaaatgacattaaaaatccttataagacaaagaaatagaaatagctgaaaaaaggtactgcggcagtcaagctatcaatgcgatctaacacaccgccatgaccaggaatcaattggctactgtctttaactcctgactcacgtttaaacatactttcagttaaatcgcccaatactgaaattgcaactgtcgctacagaaagaatgataaatccagtaatatttcgatcgcctactaaagtattgttagagaaatgaataaagataaaagcaagcactaatgctgtaattaagccaccaatgaccccttcccaacttttacctggcgatactttaggggcaagtttacgtttgccaaaggcacgtccgctaaaataagcaccagaatcagccgcccaaacaagtataaatacgtaaagtaataaaaataagccgtgataaggatcatgggtatagtgttctaaacgtaaacgtaatacacctgcgacaaatggaatcaacgtagaaaaggcaaataaaagttgtaaaagtggatttttagaccaaaatttagctgatttaggataactgatcacaagtaacaaagctaaaccccaccagctaacagcatttatcaataaaagctgaagatgttgttcaaacacatgccctgcatctaaatagttgccctcagtatagagccataagaagataaatacgcctaaaaaggtagtcacaaaaaaacgtatcaaaggttgttttaggcgagcaaattgagtccattcccaaatgcctaaaatcgctactgcccctaaagcgagggcaaaataaaaaggcgtgaataaaaatagcgcacataaaaatgcagcaattaacacaatagcagataaaactcgttgtttaagcataattttaatccgtttaactattcagtcccgccaaaacggcgatgacgttgttgataacttgcaatcgcgcgattaaattctaattgattaaaatcaggccaaagcacatcggaaaaatataattccgcataggcaatttgccataataaaaagttgcttatgcgctgttctccactggtgcgaattaataaatccacaggtggtgcattttgggttgcaagatgatgttgaaaagtcgagttattaatatctgaaactgacatttcttcttttttaactttttctgcaatttgtttagcggcttgaataatatcccaacaaccgccgtaatttgccgcaatattgagtgtaagtgcggtatttttttctgttaaattttccgcttttttgattttttcttgtaaagtttcactaaaacgagatacatcgcctataattttcagacaaatattatttttatgtaattttttcacttcgcgatccaaggcttgcataaaaagcgacattaacgcactgatttcttgttctgggcgactccaattttcgctactaaaggcataaagtgtgagtacttccacaccgatttgtcgtgcataagccactgctttgcgtaccgcagtaacgccattggtgtgtccgaaaattcgcattttatttttctgttttgcccaacgaccattaccatccataataatggcaacgtgttttggtatatttgtttgatccaactctatcattatttttattattgagagacctctataaatttggtggtaaactatatcataagttatattggcttgctatgaattcctttgttctaatctgttctgcaaaaattgaaaatttattgtaaaaaacaactaaaaaaccaccgcactttttatttctctccctattaatttttgccattttacggtattctatgccacattttctattgtcaaaatgctgcaaaagtgcggttaaaatttaaggtgattttatgcaagaacaatatcgccccgatatgatcgaaccaaaggttcaacaatattgggcagaaaataaagttttcaaagcaatcaaagacgaatctaaagaaaaatattactgtctttctatgttcccatatccttctggccgcctgcatatgggacatgtacgtaactatactattggtgatgtcatttctcgttatcaacgcatgctaggcaaaaacgtattacaaccctttggttgggatgctttcggcttaccagcagaaggtgccgcaatcaaaaacaaaactgcgcctgctaaatggacgtacgaaaacattgcctacatgaaaaaacaacttcagcttttaggctttggtttcgactgggatcgtgaaatcgcaacctgtaaaccagaatactacaaatgggaacaatggttcttcactgagctttacaaaaaaggcttagtgtacaaaaaaacctcaaccgtaaactggtgcccgaatgatgaaacagtgctcgcaaacgagcaagtacacgaaggttgttgctggcgttgtgatacacctgtggaacaaaaagaaatcccacaatggtttatcaaaattactgactatgcagagcaattattaggtggtttagatgcccttccacaatggcctgacatggtaaaaaccatgcaacgtaactggattggtcgttctgaaggggtagaaattacctttgatgttgcaaataccaacgaaaaagtggcggtttacaccacgcgtccagataccttttacggcgtgagttatttaggcattgctgcagcacatccattagcaagtttagcggctcaaaataatcctgaattagccgcctttatccaagaagcgaaaaacgccaaagtggcagaagctgatcttgcgacaatggagaaaaaaggaatggcaacgggcttatttgctattcatccattgacgggcgaaaaattaccgatttgggtcgctaatttcgtgttaatgcactatggcacaggggctgtcatggctgttccagctcacgaccaacgtgactttgaatttgctcaaaaatatagtttgccaattaaacaagtgatcgcaccgcttgcaaatgaagaaattgatttaaccaaacaagctttcgttgaacacggtaaattagtgaactcagctgaatttgatggtaaagactttgatggtgctttcaacggcattgcagataaattagaaaaattaggtgttggaaaacgtcaagttaattaccgtttacgtgactggggcgtttctcgccaacgttattggggtgcaccaattccgatgctaacccttgaaaatggcgatgtagtacctgcaccgttagaagatttacctattattctgcctgaagatgtggtaatggatggtgtaaaaagtccaattaaagctgaccctaattgggcaaaaacaacccttaacggcacaccagcgtcaaaagaaacggatacctttgatacctttatggaatcctcttggtattacgcgcgctacacttgtccacaatatcaaaatggcatgcttgatgcggaagaagcaaactattggttaccagtggatcaatatatcggtggtattgaacacgcaacaatgcacttgctctacttccgcttcttccacaaattattgcgtgatgcaggatttgtaaccagtgacgaaccagccgataaattattatgtcaaggtatggtgcttgcagatgcgttctactacacaagtccaaccaatgagcgtatttgggtaagtccaacacaggtgactcttgaacgtgatgaaaaaggcagaattattaaagcgaccgatcctgaagggcgtgaattagtccacagtggcatgaccaaaatgtcgaaatccaaaaataacggtattgacccacaagaaatggtagaaaaatatggtgccgatactgttcgtctatttatgatgtttgcctctccagcagaaatgaccttggaatggcaagaatctggcgtagaaggggcgaaacgtttcttagggcgtgtttggaatttggtatatcaatatcaacaaaatccagcaaaaactagcctagatttgaccgcactttccgcagaacaaaaagtgcttcgtcgtgaagtgcataaaaccattgcgaaagtgagcgatgatattggtcgtcgtcaaacatttaatactgcgattgctgcagtgatggaattgatgaataaactgactaaggcatcgcttgatagcgagcaagatcgtgcagttatggcggaggcattaagtgcagttgttcgtatgctttatccaattacgccacatatctgttttgaattatggcaagctcttggcaatgaaagtgctattgatactgcagaatgggtaaaagccgatgaagccgcaatggtagaagatgaaaaactgattgttgtgcaagtaaatggcaaggttcgtggcaaagttactgttgcggcagatgcagatgaagacacagtcaaaacgattgcttttgcggatgaaaatgtgaagaaatttattgataatcaacacattgtcaaagtgatttatgtcgtaggtaaattattaaacgtggtagtgaaaccataatacatagggtgtgtggatttaaaattcacgcaccattttttataggtatgtgaaatatttacattttacacgtcctacaataaaggtaatttttatgatcaactcaatcaagactttactgcttaccgcaacattagcaattctttctgcttgcggttggcattttcaacagtcggttactatgccaaatgaatggcgaacattagcccttgaaagtgatgactcttataatgattttactgttattatgcgtcgcaaattgcaggaaaatcaggttaatgtcgtcaatttagaacaaaatattcctattttacgtattaataaacagattacttcagatcaagttgcgtctatttttaagcacggacgtgaggcagaaaaacttttaatgttggaagtagaagccactttccgccttgctaatggcgaaagctatccaatcaatgcgaaagtaaaccgtactttctttgataatgcacgtgcagcattagccaaatcagaagaacgagaggtaatttggaatgatatgcgcgagcaagtagcgcgtcaattaatcgtaaaaataattgcgttacaaaatcaaataaaaaggaaataatgaaccgcatttttccagagcaactaaatcatcatcttgcgcaaggcttggctagagtttatctcttgcaagggcaagatcctttattacttagtgaaactgaggatacactttgtcaagtggcaaaccagcaaggttttgatgaaaaaaatactattcagattgatagccaaactgattgggcacaacttatagaatcttgtcaatctataggattgttttttagtaaacaaatactaagcttgaatttacctgaaaatttcaccgcacttttgcagaaaaatctgcaagaacttatatccgtattgcataaagatgtcttgcttattttacaggtagcaaaattggctaaagggattgaaaagcaaacgtggtttattacacttaatcaatatgaaccaaatacaatactgataaattgtcaaacaccgacggtagaaaacttaccacgttgggtaaaaaatcgtaccaaagcaatggggttagacgctgacaatgaagcaattcaacaactttgttatagttatgaaaacaatctgctcgcactcaaacaagctctgcagcttttagatttgctctatcctgaccataaacttaactacaatcgtgttattagcgtggtggaacaatcctcaatttttacaccatttcaatggattgatgcgttgcttgttggaaaggcaaatcgtgctaaacgtattttaaaaggtttacaagctgaagatgtgcaacctgttattttattacgcacactacagcgagaattatttacgttgcttgaactcacaaaaccacagcaacgtattgtgacaacggaaaaacttccaactcaacaaattaagactgaatttgatcgtctaaaaatctggcaaaatcgccgaccgctctttttaagtgcgattcaccgtttaacttaccagactctctacaaaattatccaagaactcgctaatattgaacgtctaactaaacaagaatttagtgatgaagtatggattaaactcgctgatttatctgtaaaaatttgtttgtagtcacaaggcaaataaaatagacaatattgaaataagatttttgataaaaaagaaattttttgttggaaaaatggtcccctacctacttccattttttgaacttatcccttgtcatacctaaaattaataagagtgttagtatctaaaaagggaacaaaacagggaacatcactataaaaaatggtcttttttgatgtcattatttgggaattatttggcaagttagaaaatttatcaatctttaattctcgtttaatctcgttttatctgtcgagcgtgaaataaacaaaaagcgaatatttttgttcgttttgtgataagtgtttgtttttcgggtataatatgcccgattagtttttggctaaatttcataataaatctttcgttgtatggtttttttcctaagtccctgcaccaaccaagtcaagcctcgcggggctttttttgccctcaagtcagcgctcgccttaaaacaacttgacttgcactttatcttgcccttttaactgtgctaatcgttcttcattcgtcatcggcttaatgcctttttcctgcaaggtttctttttcggttttatcccagttgttcgattcggggcaatccacataaaccgcccttttaatgttactaatctgccctacaaaatcggcgtttaattgcccacatgatgaaggctttttttaaatttatagctatctaaaattaaactttccgtttcttttttcgggaattctatatagaattttccctataattaattcctctaatttgtttaatatgtcgaatttaagtatgctaatcagcatggaattttccgacttttgggggcactaaatacaagatcattaatacatgttctttctacattgtggtttatataaattgaaaaaggcaataaatcaatttgataataatgcaataaatcatctactgttactggctcgccaaattctcttgtcaatttatccgctgcctgttgcaagcataccattttctagggggtaatgttggtttattttttgccataatttttcttatcctaagtaaaaataaagcccggtttagtgggctgttctttgttctgcggttttatagacttctaatcgttccctttttccaatagatacaacaataatggtgatttcctgatctcttacttgataaactaatcgatagcctgcgcttcttaattttattttatataaatcattttcgccctttaatttatcggcttgaatgcgtggatttatcattctttcggctaatttatttttaaattgctggcgtaaagtttctcctaacttattccattcttttaatgcacgtttatcaaaaatgagtttataagtcatttagatcaacctctacaggttcaagagtggcaagccgttcatttgccattctgctgagttctaaatcttcgattaattcttgcatatgagagaataattctggggtgatgcaataaaatgcgggttggtttcggttcaatattgcgactattccgctttcgctttcttgaattacgcccattgggtttcgttttaagtctgtaatgcttgccgcttgttctgccagtatttgatgtaatgccatataatgcccctttcagtgtttaatttaacgacatgataacaccactaaaaatcttttaaaagatacaaaaaagcccctttcggggcttgattagtggcggttgagttcgagttttttgcatcgtttgatatattcggttgtgaggtctatggcttcgcgttcagtaagtgcgccaatgttgcaaaggtgtgctataaattccgccttcataatatcgcccccacggtctgaaaatgaatctagctgcttgaatatatcttcttttctcattttgttatttacgtgagtttgtcgcattgctccccctattcaaacgtaaaacaagcggatgcggcggctttattgttgaaagtgcggttgttttctaacgcactttgttcaagctgcccccataattcacgcataaatcgaggcttttcattcgcctgtatgattccacgtgaaatataatcttgcacgctgtaattgataaataaatgcacggcttcaaacaatttacttgtgcattcttcagggggtatctgttccattattgcacctcatcaatgctttcaattagcaccgcatagcggtgattttctagcaagtaatcaagcatcacagagaaataaatttgcacgttattttgtctcggttcttgtttgaagaacaagcgagcggtgttttgcttgaagtaaatcgcaaggttagaaagcgttgtaattaaaatgcagtctgccggaaagaaaggcgcggaaattgcacggagtccgccaatcaggttttgtgcggtgattagcacgccgttttggctgttgagctatttcgcatcgagattgactaatgcactgctcaacataatctccccacgtctgcataatctcttgtctagaacgccattaattccttaggcggtattgatggaaaattcttagtaattggctttttaaatcttttggataatcttgtaaaaggattattttctaacacgccttcatcaatcgcattatcaaatatttgttttattgcaatgcataacttatcgcacatacctgttccctcgtttttgttctttcataaagagggaacatttaagggaacaataaaaacgaacaatgacaaacaataaaagacgaaaacaacaataaggttgattctaaagtgctgtttttatgatgttttttgacagaaaagacgttatttgacaagtcgaatggtcccccctaccggacttgaaccagtgaccaagcgattatgagtcgcctgctctaaccgactgagctaagggggggggaagtgcggtaattatagagaaataatcacttgaagtctataaaagaagggatgattgacgaaaaatcaaccatccctttttacattattgaagcactgaaatatcagctacttgtaagaataacccttgtaacgtatttaaaatcgctaatcggttttggcgtagtgctggatcttcagcatttaccatcacgttatcaaagaaactgtctactggcgcacgtaagtttgctaatttatccaatactgtcgtgtaatcgccttgtgcgataagcggttgtacttcagtgcgtaatgcaagcaccgcttcagcaagagctttttctgcttgctctacgcaaacggttaaattgatctcgccaattgcagcatctgctttcgctaagatgttacttacacgtttatttgctgctgctaacgcttccgctgaatctaaagtacggaaatgtgaaaccgcacgcactcgcgcatcaaagtcagcagggcgagttggacgacgtgctaataccgcttgaattacatccacctcaatgccttcatcttgataccatgcacggaaacggccgagcatgaagtccaccacatcagcaaccacattttgattcgtgagtttatcaccgaaaagtgcggctgattttttcactaaatcttctaaatcaagtggtaagtttttctctacgataatacgtaacgcacctaatgccgcacgacgtaatgcaaatgggtctgcactgccttttggtgcttggccgatgccgaagatacccgtcaaagtgtcaaatttatccgctaaagcgaccgcacttgccaccaaagacttaggtaattcatcacccgcaaagcgtggcatatattgttcgtttaacgccactgccacttcttcatcttcaccgtcgtgacgagcgtagtgcatacccattacgccttgcgtatcagtgaattcgaataccatgttggtcattaagtcacattttgaaagtaaccctgcacgttttgctttcgcttcatctgcaccgatttgttttgcaatttcgcctgcaagttgttcaatgcggtcagttttgtcttttaatgtaccaagttgttgttggaataacacggtttctaagcgtggtaaacgatcgaccagtttttgttttaagtcggttttgaagaagaattccgcatcggttaaacgtgggcgaaccactttttcgttcccttcgataatcgcggttggatcttctgggttgatgttcgatacgaaaataaagtgcggtaataatttgccgtctttgtcataaattgggaaatatttttggtcgcctttcatggtgtaaaccaaggcttccgcaggcacttctaagaaacgttcttcaaattttgctgctaagacgtttggatattccaccaaggaagtgacttcttcaagcagactttcttcaatgtcagccacgccaccaagtgcggtcgcttttgcttgagattttgcaagaatttctgctttacgttcattgaagtctgctaccacagaacctttttcacgcaataattgcggatattggtctgcatgttgaatgtcaaattctttctcgcctaagaaacggtggccgcgaatggtgcgagcacttgccacacctaaaatttcgccttcgattaactcatcacctaacaacatagtcacagtgtgaactggacggataaattgcacggttttatctgcccaacgcattggttttggaattggcaatttcgccaacgcattagccacaatgtcgttaagtaagtttttggtcggctgaccttcaatttttgcacggtgaatgagccattcgcctttatcagttgcaatgcgttctgcttgctcaacggtaataccacaaccacgcgcccagccttctgccgctttagttggtttaccttccgcatcaaaggctgctgacactgcaggccctcgtttttccatttctttgctcggttgttgtgtcgccaagttcaacaccttcaccgccaaacgacgtggcgccgcaaaccattcgattttgtcgaaggttaaacctgcttggtttaattccgcctcaacgttatccgcaaaagaggtcgctaatgttttgagagcttttggtggcagctcttccgtgccgatttctacaaggaagttttgggttgtcattttgtttctcttatttaaaaattctgtggatttaaattcttattttcttcgttattacttctgccaaatctcccctacccctctttgctaaagagggattggatctttggagagttaaatatttatgttctactttaacgttttttgaaagcagataatttaatctctattgaaattaaaatgtaaataagccagttactatcaatttactcaagaattcccctctttagcaaagaggggtaggggagatttactcgcttcgctcgcacttcgtgccgttgctaaagcaacgttcaaacgcaagcgtttgtggcagaggttaatccaacctcatactcaatcagcccttacattctctaaaaacaaataaatctgctctactaccgcttcaatttcacgcataacttcatcattgctaaaccgcatcactgtaaaaccaagtgaatttaattctgcatctcgtaatgcatctttttcctgataatcaggttcatagtgctgactaccgtctaattcgataatcagctttgctttcgcacaataaaaatcaacgatataacttaaaagtggcttttgtcgattaaatcgaaatcctaataattgatctcgattgatgcgttgccatagttttctttctgcatccgtttgatccgctcgcaatttttgcgaattctcttttaggtatttttcatagggttgcatgaaaactgctgttctatctttcccaaaacttaaaaaattacttttaactttgatgggtctaaaacaacatcgccatttggtaataacaacgcaggaatgcctaaatagccatttgctttcgagttatcaaattctgcactgctatcgcgtaaacgaatgaattgcttgagattaggtaatgaagtcataatttctacttcatcgtaatccacacctaagcgatccaactccgcgacaaatggcgcggtatctgggcatgtttctgcataaaaaagaatgggtttgctcatttttctctcctgaagtgcggtcaaatttcaccgcacttttttgaattacctttaaatgttattttttacaacctgggaaacctaaggcttcacggcttgcataataggcttccgccacgcctttggttaaggcacgaatgcgtaaaatatagcgttggcgttcggtgaccgaaattgctttacgcgcatctaataagttaaagctgtgtgcggcttttaaaatgcgctcataagccggtaatggtaacggtttttctaaggctaataactcttgtgcttctttttcgtattgatcgaagcagtagaataagaaatcggtgtttgcgtgttcaaagttataggttgattgctcaacttcattttgatggaaaacatcgccataagtggttttgcctaatggaccgtcagaccaaactaagtcatatacagaatctacgccttgaatgtacatggctaaacgctctaaaccgtaggtcacttcgcccgttacaggtttacattctaagccgcccacttgttggaaataggtaaactgggttacttccataccgtttagccatacttcccaacctaagccccatgcacctaaggttgggttttcccagttatcttctacgaaacgaatatcgtttttggtcggatcgaagccgagcatttcaagcgatcctaaataaagttcttgaatgttatctggagaaggtttgattactacttggaattgatagtagtgttgtaaacggtttgggttttcaccgtagcgaccgtccgttgggcggcgtgaaggttgaacataagcaaatgccattggctctgggcctaatgcgcgcaatgcggtcattgggtgagaagtacctgcgcccacttccatatcaaaaggttgcacaatggtgcagccttggtttgcccaatattcttgcagggctaaaatcataccttggaatgtttttacgttaaattttgtactcataatcgttgatctaatgtgattaaaaatgttggtattatacttgaatccgtaaaagggataaaggcgaaaaatgcggttgaaaatcaggctttataaagatatatcaagtaagtaattttgaatatttaggtagattttaagtcttattttagtaatagttttttttgattaatttaatagatttcgattgtttaaacctttctatatgatacgcaagaaattcttttcaacctaactaaatttattaactttacaaggagtctacaatgagttctcaatgccctttctcgcacttagctgcgacaaacttaacaatgggtaacggtgcacccgttgctgataaccaaaacagcttaacagctggtccacgtggtccattacttgcacaagatttatggcttaacgaaaaattagctgatttcgtacgtgaagtgatcccagagcgtcgtatgcacgctaaaggttctggtgcatttggtacttttactgtcacacacgatattactaaatatactcgtgcaaaaatttttagtgaagtgggtaaaaaaacggaaatgttcgcacgttttactaccgtggcaggcgaacgtggtgcagcagatgctgagcgtgatattcgtggttttgcattaaaattctatactgaagaaggtaactgggatttagtaggtaacaatacgccagtattcttcttacgtgatccacgtaaattcccagatttaaataaagcagtaaaacgtgatccgcgtactaatatgcgttcagcaactaataactgggatttctggacattattaccagaagcattacaccaagtcactgttgtaatgagtgatcgtggtattccagcaagttatcgtcatatgcacggtttcggttctcacacttatagtttctggaacgaagcgggcgaacgtttttgggtaaaattccacttccgtactcaacaaggcattaaaaatttaacagatgctgaagcagcagaaattattgcaaatgaccgtgaaagccatcaacgtgatttatatgaagcgattgaacgtggcgatttccctaaatggacattatttgtacaaattatgccggaagcagatgcggaaaaagtgccttatcacccattcgacttaactaaagtatggccgaaaaaagactatccattaattgaagtcggcgagtttgaattaaaccgtaacccagaaaacttcttcgctgatgtagaacaatctgcatttgcaccaagtaacttggttccgggtattggcgcaagccctgacagaatgttacaagcccgtttatttaactatgcggatgcacaacgttaccgtttaggtgtgaactaccgtcaaattccagtaaaccgtccacgttgccctgttcatagcaaccaacgtgatggtcaaggtcgtgtagatggtaactacggtagcttgccacactacgagccaaacagcttcagccaatggcaacaacaaccagactttgctgaaccaccacttcgtatcaacggagatgcagcacactgggattatcgtaacgatgataacgattacttcagccaacctcgtgcattatttaacttaatgaatgcagagcaaaaacaatcattattcaacaacacggcagcagcaatgggcgatgcacctgatttcatcaaatatcgtcatattcgtaactgccactggtgtgatgccgcatacggtgaaggcgttgcgaaagcattaggtttaaccgttgaagatgcattaaaagctcgtgatactgatcctgcattaggtcaaggtggattgttataatctttcgagttaattattttaaataaataatagtagtaatgaatctgcacccaaaagttaggctaaggtttaactgattagggtgcagatttttttcaatgaaatattactaattcattacataatacttgaacgattttgtaatcgttcaaaaatttgaatataaaaataacctataatagcttccattttttatggtaaatattgtatttaagtaatgctaaatatatatcatggcacaaaataatgaggtataaaatggctatcattacccgtcactgcagtaaaatcttcgcgtaatcccataccgcaagccacatcccccacaacccaagagccaataattggatacattccatcaaaactcggtaattcaaatttttgttgataaacataacctgaattagcataaaatgcagagtgttcgcttcctttcgctgcaaattctacaccattatttttctcataatagaaaacattggcaccttctcgacctaacaatggttttttcacccacatcgataaatcttttggtagttcgaaaggcgtaaaataagcaggcaataaatgcggatgattaggataacgcgcccaaagttttgccaatagtgctttattacttaacaacattttccacgctggttcaataaatcgtgtttcagccgttgtaatatggcgagcaaactcagcgtggcttagccattctagtggatacaatttaaataacatttcaataggctgatcatttaaatctacaaatttttttgtttcactgttatagccaatatcttccaccgctaattgatgaatattccaacccgcgttataagccacatcagctaaataatccaaattaccccaatcttcacggccagcatcctgcatggcactcaaatggaaatctgttttgccactttgttgtttcaaaaattggaaatgttttattaattcttcatgaatccagttaaattgatcacgatgtttcaaaccctcaatttgctccaaccactgccattggacaaccgctgcctccaacaaagatgttggtgtatcggcgttatattcaaacatttttaggttgtcgccatcatagccaaaatcaaagcgtccatataaataaggatcttgattacgccaagaggtttcaataagctgtttttgcaactccgtaaaacgataattttcataatcgccttttttaatttcatccgccgcaaaatctaaacacattgaatgcaattcattagttgtatcctcaatgcgatcaatttccgctaaggtaaattcataggcgacattatcagaccaataatgagatccatcactggaaggcaaattatagtaatcaaatccaacattaagtagctgttgcaccatatctggtcgagtaggaaaccctgttacacgtttcatttagcccccactgctacgatgagtattatttgggctactaaaaccaccacgagatacaggtttgctattcatgcttcctgcatttcctttcacgagcattggttttccaacagaacgattcgtttgaggttgcacaacttgccctgttggtgtggtgacagctcgatttccaggatgatagcttgggccaaggaaactactaattgcacgagccgccatataccctataacgccaccagcaattgcggctcctaaagaaggatcggtactttcagcttttgcagttgattcagcactgttatcgctttgattagcttgtgcattattttcagctggattttttaccgcactttctgcattaccattatcacgaatatttaaaccaagcccctgttgtggtgtagtttcagttttctgagtactttcagtatttttatctgcttcacaaagctcaatttttttccaatccgctaaacaatcgtctaaagactgatacacatcacgttgtacttgctcttctgaacagcctcctaataaggctacaatagataaactaactaaaatctgatttttctttttcattgttctcaatttttatcgaatggttttcacgcctagccattgctcggcctgtttattagtaatttcttcacgagtccacatactcattaaatctggttgtggatatttattgctgttatagccgactaagcgagcaaaatcaaatacggcatgaggatagccattaataagcaacaaggctaaataaccactctcatcccaacaaattttaagtttgcgtgcttcatgatgattagaggttgaatcaacattatacacgtgcaacatatccactatcggttgagcattttgacgcatatcaagcgcataaaaatagccagtttccccgtcatcttcaaacattacagcaaaatgctcaaatactgtcgaatgtgttcccacttgctttggcgttcccaaaaagagttcgtcttctaaagttaaatgtaacattctctttcctttaaatattagatataaaaacaccgcacttctatacaaagtgcggtgagattttacagtaaattcagcgtgaattacgcttgacctttaaccgcttttaagcctgggaatgctgctggagtaccagcgcgttctaatgcttcttcgatacggattaattggttgtatttcgcaatacggtcagaacggctcatagaaccagttttgatttgacctgctgctgtacccaccgctaaatcagcgatagttgcatcttcagtttcgcctgaacggtgagagattacagcggtgtaacctgcatctttcgccattttaattgctgctaaagtttcagttaaagaaccgatttggttgaatttgattaagatagagtttgcgatacctttttcgataccttcttttaagattttggtattcgttacgaataaatcatcgcccactaattgaacgcggtcgcctaacactttagtttggtatgcaaaaccttcccagtcagattcatcttgaccatcttcgatagacacgattgggtattgtttagttaattcttcaagatagtgtgtgaactcttgagaagtgaatgatttaccttcacctttcatttcgtacataccattttctttgttatagaactcagaagatgcgcagtccatcgctaaagtaacgtctttacctaatacataacctgctttttctactgcttctttgatacaggctaaagcgtctgcgttagaggctaagtttggagcgaaaccaccttcgtcaccaaccgcagtgctcatgcctttagattttaatacttttgcaaggttgtggaatacttcagcaccgatacgaagtgcttcacgtaatgttttcgcaccaactggttgaatcatgaattcttggatatcaacgttgttatctgcatgttcgccaccgttaatgatgttcatcattggtaatggcatagaataaacaccagcagtgccatttaattctgcaatgtaagcgtaaagtggtaaacctttagatgctgcagctgcttttgcatttgctaaagataccgctaagattgcatttgcaccaaagttagatttgttttcggttccgtctaaatcgatcatgatttggtcgatttcagcttggtttgttgcatctttaccaacgatagcttgtgcaatttcgttgttcactgccgccacagcttttaatacgcctttacctaagaaacgagatttgtcgccgtcacgtaattctaatgcttcacgagaaccagttgatgcgccagatggagctgctgctaaaccaacaaaaccaccttcaagatgaacttcagcttcaacagttggattaccgcgtgagtcgatgatttcgcgaccaatcactttaacgatttttgccatttttattttcctcaattaagttaattaaaacgggttaggcgagcctaaaactagcgatatgataaagctattttgagattttgtcttgtaaaaaatgcgtatgctttgatctttatctatttattatcttgagatacttagagcacaagcataagccgagctccacgcccactggaagttataaccaccgagccagcccgtcacatccaatacttcaccaataaaatataaaccgctgacttggttgctttccattgttttagaagaaattactttagtatccaccccgcccattgtgacttcagccgtacgatagccctctgtgccatttggagtaaattcccagtgatgaataaaatccaccagattttttacccgcactttgctgatgttagcgataacttcatcttgcacaatgccttgttcaatccaaagttcgaccaattttttcggcaataatcgaaccaagatggttttcaacatttgttttggagaagattgttttgcttgattaatttcctcttccacattgtggttcggtaataaatcgatttccactgactcagtcggctgccaataattggaaatttgcaataccgcagggcctgaaataccacgatgagtaaacaaaagctggttgtaaaaagatttgccgcacagtgccgtgatagtgacaggcaagctaatacctgaaagtgcggttaaaaatttatctgtttctcgataagtaaaaggcactaaactcgcacgaggcggaataacaggaatgccaaattgttccgcaatttgatagccaaatggcgttgcaccaagcccaggcatagaaagcccacctgtcgcaacaatcaaatttttacattgccattgggttgaatttacctgtaaaacaaaccgcactttttcatcattttgaatccgttcaacttgagaaacttcgctacgcaataaaatcttagcagcagatttatcgcattcagatttcagcatttcaacgatttgttctgcgccctcatcgcaaaataattgccccaattccttttcgtgataagcaatcccttgctccgccactaaagaaataaaatcccagttggtataacgagctagtgccgatttgacgaaatgaggattttgcgaaagataatgagcaggcgtaacctctaaattggtgaaattacaaaacccaccgcccgacatcaaaatcttacgtccgatttttttgccgttgtcgaaaactgtcaccgacttgcctagcttagccaattgtgcggcacaaaataatcctgccgcacccgcaccaataataatgttttcagaatattggctcacggattttgtccttttttaccacgttgtaaaaaatccaacatcttcattcgttgaataactgaacgacgatccactgccgcattacctgaatctaataactgctgtaaatacgcactggcttgttgatattggcgattttctaaggcaattgtcgccaacaaagaaagactagatacttcatttttatcttttgccaaagcttcattcaaaagttgttcgacttttggggtcatttgctggcctgcttgataataaagtgcggtggctgccaagcctaaaatattaggtttacttcccgacaatttttctgcattagaataagccacaagcgcactatcaaattcattattctgtacataggcttctccaagttgaagccaagtttccgcattattcggatcagttcgcagtttattttggagcttctcaatcacattttcatttttgtgttcatcattcatttcaacattttgattatgttgctcaatcatcgattgctcgccttgttgaacacgactaaaacgatcaagggaaaaataataagcagttggaatagcgatgagtaaagtaaaaagcacaaaataaattttgctattcacttttcccttagaaagtttacttggctccccttgcttgcggggggagctgccaaaggttgaggggtgggaaattatttcatcattctctagttgttgtgcaaccactttttctgaaaactgtttttttctatttgagaaataaagcaatactgcagctaaaattaaaagagcgactggcaataaccataacaacgccgtattccatttgaatggcggtttgtaattcacaaaatcaccaaatctagccgtcattttatcgataatttgctgattgcttttgccctcatccaccattttgtacacttcaagacgcaagtcataagcaattggagaattagattccaccaaattttggttctgacattgtggacagcgtaaagattttgccagctctacggcgcgagtacgatcatcttgattttgaaattgataggtatccaccatttccgctcgggcgaataaggaaaatgcgaataaaagtgcggttgcaaaaaagactgttttttgaacctgaataaaaccgcgagtaaaaatatctaatatacttttcatttgttcttcaatgcttcaattttcggcaaaaataccgtttgccaagtttctttatccaataaaccagaatggcgataacgaatcacaccattttcatccacaagataagtttctggcgcgccatccacgcccaattttaatcccaattccccatgactatcatcaatgctcaagacgaacgggttgcccattcgcttaagcatttcaatgccatttttccgattatcacggtaatccacgcccacaataggcaacgtttttgcaatctcaattaacagaggatgttcttctttgcaataaccacaccaacttccccaaacatttaataaaaatggctgtttaggaaactctttcgggcttacgatttgtgatggttcatgtaaattagcctgataaaactctggaacaggtttatcaattaaagccgaagcaatttttttcggatcttgatttaaccctgcaattaataatatacacacgcctaaaagcacaaagagcggtgtaaaaaagataagttttttgttcattatttttcctgttttctgcgtaatccgaagacgctaaaaagtgcaccaaaggccattaaaataccgcccgcccaaagccaacgaatcagtggtttataatgtaagcggaaagtaaattcccctttgccgagagaatcgcccatcacaatatataaatcgccccaaaaaccaccatcaagccccacttcactcattgtcattgttcgtacatcgtaataacggcgttctgggataatttctgcataaggtttaccatttttagttacgtcaaaaaaggcgacttctgccgtaaagtttggcccaatttcattagaaaattggcgataatgaaattcatattgccctaacgtttgactttgttgcggtgctaaacgcacaccaatttcactgccaaaatacccagtcatcaccgcaccaatagtcacaatcgccacgccacagtgtgctaaaatcatcccaaattgagacaagcgaatttgtcgccaattttgccataacgtgacgaataaaagccaaatcgcaagagttaataacacaaaggcgaaagcgtgaaaattcaacgcagaattatggcgtagctgttgccaaatcattaggcatgcaagaatcaaagacggaataagcaaccacccacaacgtatcaataatgtgcgatcaaattgccccttacgtatgctaagcacaattaccattaagattaaaatcgccgtaataatggggaagaaaatactattaaaataaggacttcccaccgaaattgagccccaattcatcgcttggaataacatcgggtaaaaggtacctaaaaaggtagaaaccgtcgcaatggtcagcaaaatattcagtaataaaatgccacccgatttagaaacgaactgaaatttcaccgcactttctgatgaacttcccgctcgtaaagcgaataaaccaaaggctaacgctgtcaaaacaaagaaaattaataacaacacataaccgcgcgtgttatccaatgcaaaggcgtgcacagaagtgagcgcaccagaacgaacaataaacgtgcctaatacgctaaaggcaaaagcaagcagagaaaaaagcgttgtccaataactaaatacgccttgtttttccgtcgccattaaactgtgtaataacgccaaaccaagcaaccaaggcattaaagacgcattttctacgggatcccagaaccaccaaccgccccagccgagctcgtaatatgcccaccaagcaccaagcacaatgccaatggttaaaaataaccaagaaaccaacacccacccacgcattgagcgggcaatttgtcgtgcagattggttataaatcaatgctctcaaactcattgcaaaatttaccacaaagcccacatagccaacatataataaaggcggatggaaaattaatcccacatcttgcaacattggattgagatcgcgcccttctgcgggagcagggaaaatgcgtccaaatggattggaataaaataaaataaacaccgcaaaaccaaagcaaatcaatcccaataaagataaagattgagcggaaaaagtgcggtcattttttcgattaaaaaaagcaaaagcagcaagccataaactcaatgaaaataaccaaaacaacattgaaccttcatgtcctccccaagtggcagccattttaaaaaatgtaggtaattgagagttggaatgtgccgctacatattcaagggtgaaatcatccaccgcaaaagaataagcaagcaaaccaattgagaacgtcgtcgcaagggtaaaaatataactaagcggccaagcagcattaattaaagtcgaattttttttgaataacccaaattgaggcactaacgcaagaaaaaacgcgctagctgttgcgagtaaaagaaggaaaaagccaagttctggaagcataatgtcgtcgtttttttcgttgatgcgcagataaagtcgctaatcaagtatgtttcattaataaaattaaaaatagcaccttgataggtgctattgtgcttataaaaattaatgattaaattcagcacctaaacaagggcgaattttatttaacatttctttaattacgcgtgatggtgcagcaatgatattgccactgcgtaagtagctgttaccagcattaaaatcacagactaagccacctgcttcacgcacgattaaatcgccagcagcacaatcccatgcttttaagcccatttcaaaataaccatcaatacggtttgacgccacatagcataaatccaatgcggcagaaccagtacgacggaaatccgcagcatcttcaattaaggcattcatcattgcaaattgagttggcattaattttggttgtttgaatgggaaaccagtggctaaaattgaaccttgaatttcacgtttactatctacacgtaaacgtacttcatttaattttgcaccttcaccacgcacagcggtaaataattcattacggattggatcgtaaacaaccccgacttcagtgcgattttttacacgaactgcgatagacacagaaaagtggggaagtcctgtcataaaattacgagtaccatctagcggatcaataatccattgtacatcgctatctttgccttcaattgcgcctgtttcttccgtaataattgtgtgatcaggataagatttacgaataacttcaatgatttctgcttcagacgctttatcaacgtttgttacataatcattaatacctttttgtgtgctttcgatagcatcacggcgttcataatttttagcaatcacattgcccgcttttcgtgccgcacgaattgcgatatttaacattggattcatatttccaccagcttttaaagaacagaaaaattccgtgccattatagcgagatttgccaaaataactagttgaaaatcataaaacaatggtttttataggttttcagaaaaactttgcgatacagatcgcaaaaatcagatcaagtgatttttctacccattatttatggttaaagtgcggtggaaaattggagcgttttatgcagaaaggtatgacattagtggaattattgattgggttagccattatcagtattgcgctgaattttgcagcaccattatggaaaaccgattcacctaaaacgattttagccaaagagcaacatcgcctgtatttatttctacgccaaattcaggctcgtgcagaaaattcatcggaagtgtggtttttacttatcaatcgtaatcttgcgacacagcaatggtgcttaacagcacaagtaaaaaataaccaaacttgtgattgtttaaatccgataaattgcccgaaagaggtttatgctcatttttactacccttattttcctaacaaaacgatgattcaaagtcatcatatttatccaaaagaaatcacgagatttgatggcattcgtaatactatcgttactcgttgctttattttgcaagctgaaaatgaacgtacgttatttttatttttcaatgttggcagtattcgtttgaaaactaatcaatttgatagtgcttgtaattaatgatgaaagtcttattaaaagggcaaaccctattagcgctgatgatttcactgtctttgtcgtctttattattgctaagcatttcgcatttttatgtgcaaatacaaacgcaaaatcaacacatgctattacatttaaagttacaggctgaattacaacgaacattacagttaataggtaaagatcttcgccgattaggatttcgagcattaaatgcaaaactgacggaaagcaatttatctttatttgaattagatgaacaaggcacagctatttttattagccaagaagataatgcgccacctaatagctgcgtgttgttcttttatgatttaaataaaaatgggtgtgttggcaaaggttcgccgaaaacctgtatgaaaaaaggtaaaaatacatctaaaagtagtactgaagaattattcggctataaagtgagtaacaaaatgataaaaaccaaactgacttatcaaagtgttattcctactaattgcacggcagaaacttgtaaacgtgcttttcaacaaaccgcttgtaacgctggtggtggatgggcagatttattagataacaacgaatatgaaatcactaggttacaatttaattggttaattgaaggcaaaggattagaaatcaagctaaaaggaaatttaaaacaaaccccaaatatcagttatgaaacatcccttgttgttgcactatggaatcaaaaataacggaatcaaaaataatgacaatacaaaaaggcattatcacgctgactattctgatttttatttcaggtttattaaccgtaatcttattgttggatgacagccatttaagtttttttcgtgcacaacaaaatcaacgaaaacactatgtggaaagaacattacaactacaaaaaatgacagaggagaaaaaacaaactgcctgtattgatttacccttaaataataatgaaagagtgaagcaaatcagcatcgcccttgagggtgccgccgatgcaattcaatattttctttggtgtgaaagaatgagcctatttaaaaaatcgcctaaaaagggagataatcaaggcgcattgaaagattttgtgagtggcgaaaaacttgcctattttcgaccgcacttttcttccctgcccagaattttaaatgcgaataaaatgcctaaactgtattggttttcagattcacaagcagaggttgaaattaatggcaccgtatctgccgtattaattgcagagggcgatttaaaattgactggcaaagggaggattagtggcgcagtgattaccagcgggaatttaactttagatggcgtaactttagcttatgggaaaaagacggtggttgctttagtgcaacaatatagtcagtggcagttagcagaaaaaagttggagtgattttaatgttcaggatgaataaaggaatatcttttattacattgttattttctttagctttatttagcgttttatttcttgtttttaatcaatggacggcaagccaaagaaaaagtgcggtaaaaacttatcaagattttcaggcaatacagattgcggagaatcaagctcaacgccaatttttagggttagcttgtgaacaattgatacaacaaaatggcttaacttttcgtattcaatgtgaaaatgaacgtattattgtgcgttatcctacgagtgaaattttgataaaaactcagtaaaatggcgttgttttttctaggttaaatcatcaaaaggtcgccattgtgttcattgtttattattccaatcagcttgaaaaacaaaaagaaattctttcttcattattcaaatctttaccgcctgaagatccttttcaacaagatattatcttggtacaaagccctaatatggcgcaatggctacaaattgaacttgccaaagaaacaggtatttcagcaaacctaaaatttcctatgccagccagttttatatggcaactttatgcacaaaatttacccgcaacggcattagagaacccttttgataaagattcaatgatgtggcgtttaatgcgcttaatcccaatttttcttgagaaagaaaatttttcgcctctacgcaattatttatcatcttcgccacattctgaacaatataaactttatcaactcagcagtaaaatagccgacttatttgaccaatatttagtttatcgacctgaatggatttttgcttgggaaaaaggcgaagatgaacaaatcactgatcaaatacaaaaacaacaacctaacctaaacgcaactttgtttgcgcaaattcaaggcaatacaaaatggcaaggtgagttatggcgtgcgttggtcgtcgatgttaaatcagatgttaatgaagccacccatcgagcagctttgcataatcaattcttagccttgcttgccgataaaaaagcaccgaaaaaattaccttcacgcatatttatttttggtattcctgcgcttccaactgcttatcttaatattttgcaagcgatatcctctgaagtggatattcatttattttttaataatccttgccaagaatattggggagatattagcgatttacgccttgattatttgcgttctcgcaaacgttatcaattcaataaacaagatgaaaataaaccgctcttttccgaggatcaactttctcaactagaaaacgctcagtttgacgtcacttatcaaaaagaaaaccttcaactaggcaatccattactggcggcttggggaaaaatggggcgagattttctctatacattggtgagagatgaagaacatattccaacttatcccgtcaatgcctatcaagaaattgagtcgaacagtttactcggacaattacagtctcaaattctgcatttagaaaataaaccgctaaatatcgcaaaaaatgaccgcactttaaccctacattcttgccacagtgctatgcgagaagtggaagtattgcacgattatttactggatttattcaatcaagatcctagccttacgccaaaagatgtggttgttatgatggcagatattaaccaatatacaccttatattcaggcagttttcgggcaaaaaaatggagatgcaccacaaattccattttcactttcagataataaactttcagaaagcgatgtgttggtctcaagttacttaactttattacgcttaaaagaaagcaattttagtgcagaagatgtcttggcattgttggatattcctgcgatgcgagaacgatttaatatttctcttgctgatttgccattagtgcgagaatgggtaacggattcagggattcgtttcggtttgcaaaaaaatcaagatggcatcaatttcaattcttggcaggctggattagaacgaatgattttaggctatgcgatgcgtgaagaacagggcatttggcaagatagtctgggcttaaacagcagttatggcttaaagggcgagcttgctggaaatttatctcactttttcaccgcactttccgcgctgcatgaaacgctgcaacaagcacattccatcgaaaaatggcaagaaattttaaccgcacttttatcggatttcttcgtgcgaaatgaagacacaagcgacatgattttctatattcaagagaaaattaatgaattagctgagcatctaaaaacgctccattttaatgaagaattacaagcagaagtgatcgccgatgtcatcacaatgcaattggaagatgcgccaaatagcctcaaattccttgcaggaaaagtaaatttctgcaccttattaccaatgcgttcagtgccattcaaagtggtttgtttacttggaatgaatgatgcggattacccaagaacacaaacaccaaacagttttgatttaatgcaatatcattatcaaaaaggcgatcgtgttcgccgtgatgatgatcgctatttgttcttagaagccttattggcagcacgtgattattgctatatcagctatgttgggcgttccattacagataatcaaccgaaagaaccttctgtattggtaagccaactgttggattatattaatcaagggcaaaaggaaaatgtccttactgtcattgaacatccaatgaccgcatttagcccagataatttcaaatataacgaaaaatttacccgctcttttgcgacaaaatggttgccaatagcacaatttgacgcgagttccaacaattcagaatttgccgtcactatgacagaaaacccagaaaaaatcgaagaagttgaactggattctttagtcagctttgtggaaaatccagtgaaatttttctttgaaaaacaactcggtgtttatttccgcgataaagatgaacgcattgctgacagtgaaaacttcactttaagtgggttagataattattctctcaataatgacttaatttaccttgatgaacaaaattttgctgattattttagacaagcagaagtaaaaggcgtgttaccgcgcgcagagtttggaaaggtttatgctgaaaatattcgtgacaatgttttagaatttaaagagaaaatagccgatcttggcgagcctaaacaggcttctatagattttaatattgccgtagattggcaaaacgaaaatcaaaaaatccgtttatttggttatatggaggctttatttggcgatgattcacaagtcattcactggcattttgcgaaatacaaagatcgttattgtattcgtccttggatttattatttaattcaatgtgttacacaagaaaatgcggtaccagcaaaattaattacgcaagataaggttctcgaattaccgcctattgagcgtgaagttgcgcttgctcaattacaaatttacgtaaaagattatttacaaagccaaatagaaattcaattggtgccaaccataagaaatattaatgattttattgtagacgatgaaagtgcggtagattttgacaacgtttttgaaaaacttcaggcattaactgaaagtaatggtttcggttcaaaagccgatccatattggtcacgagtattagcgcagacctcaagatttaaacaacctgaaaatattgcaaaattattaaaacaaacaaaagcttggtttggcttattattcgcacaaaagaagacaagaaaggcacaaagctaatcgtcaaataacctattttttagtagaataacacccttttatggagaattatctatgcactgtccattttgtgatacagaagaaactaaagtcattgatagccgtttagtatctgatggttatcaagttcgccgccgccgtgagtgcggtcattgtcacgaacgttttactacttttgaaatggcagaattaatcataccgaaaattatcaaaactgatggtacacgtgagccattcaatgaagataaattgcgcagcggtattcaacacgccttagaaaaacgtcctgtaagtgcagatgatgtagaaaaagcaattaatcacataattcttcaactgcgtgcaactggagaacgtgaagtgccaagtaagttagtgggtaaacttgcgatgaatgaattaaaaaaactcgataaagtggcttatattcgttttgcatcagtctatttaagttttgatgatattgatcaattcactatcgaaattgaaaaattaaaggattaattatgcttgaattttcctcacaagattgcgtatttatgcaacgtgccttagatttggcagccaaaggacaatataccactacaccgaacccatcggtgggatgcgtattggtaaaaaatggtgaaattgtgggggaaggctttcattttaaggcaggacaacctcatgctgaacgcgttgctttagctcaagcgggtgaaaatgctaaaggagcaaccgcttacgtcaccttagagccttgcgctcattatggtcgcacaccaccttgtgcattaggattaattgaggcgggcgtagtgaaagtcattgcggctatgcaagatccgaatcctcaagtcgcaggaaaaggtttgaaaatgttgtctgatgctggtatcgaaagtgcggtgaatttattgaacgatcaagcggaaaaaataaataaaggctttttaaaacgaatgcgtcaaggtatgccttttgttcaactcaaactcgccatgagtttagatggacgaactgcaatggcaagtggagaaagtaaatggattacgggcccagatgctcgttcggacgtacaaaaaatgcgagcaaaatcatccgcacttttatctacttccacaacagtcattgcagacgatccaagcctgaacgtacgctgggatgaatttcctgaaaatcttaaaacaggatataaaaaagaatggcttcgccagcctgtgcgagtcattttagattcacaacatcgcattcagccgactcataaactttttttaacccattctcccgtttggttagtctctagtgagccacgagatttaacaggctttcctgatttttgtgaaaaaattattcttccgaaagaaaatttactaaaagaattaatgcgagaactgggaaaacgacaaatcaataccctttgggtagaggctggagcaaatttagcgggtagtttaattgatgcgaaattagtagatgaattgattatttacgttgcgcccaaattacttggcgacaatgctcgtggtctatgccaattaccgaatttaactaaacttgccgatgcaccattatggcaactcaatgaattagaacaaatcggtgacgatataaaattaacttacacaccgaaaggagtctaaatgcttaaaaaacttttccattccgcactttggggcttggctgctgcgggcgtgattttgtttgcggttccaagactgaataacagcaatatcttcacttcagacgatattgtatcgttcaaaaatgccgtgcgtattgcctctccagcagtagtgaatgtttataaccgctctttttcttccgccagcattaatgataatgatcagctacaagtgaataacttaggttctggtgtgattatgagtaaagatggctatattctgacgaataaacacgtcattcaaaatgcagatcaaattgtagtagcgttgcaaaacggaaatatttttgaggccagtcttgttggttcagatgatctcactgatctcgctgttcttaaaattcgtgcagataatctttcaactattccacaaaattcagcgcgtcaagctcacgtcggcgatgtggtattagcaatcggtaatccctacaacttaggacaaagcgtgtctcaaggaatcattagcgcaatgggtcgtaatgcggtaggcgattcggtgggcagacaaaattttattcaaactgatgcttcaattaatcgcggaaactcaggcggtgccttaattaactctgctggggaattggttggaattagcacgctaagtattggcaaaaccgccaatgaaatcgcagaaggactaaattttgccattccaatagatattgcaaatgatgtactacgtaaaattatgcgtgatggacgtgtgattcgaggttattttggtgtacaaagtgatattagttcaagtagtgaagaaggcatagttatcacagacgtaagcccgaacagcccagctgcgaaatcaggtattcaagttggcgatgtgattttgaaattaaataatcaagaaggtatttcagcccgagaaatgatgcaaattatcgcaaatacaaaacctaattcaaaagttctcgtcaccattctacgattaggcaaaatcttacaaattccagttgttattgaagaatttccagtaaattaaaaatagcggtctattttgaccgctgttttcattatatttaatactttcttttcaatttgaaaatttatttgttctaaccccttttctgacatttcgggcaaaagaaactattacgctgtccaataattaaactttcaatttttccaccgcactttggacaaggtttatctttattgccatacaccaataattcttgtgcaaaataacctgggcgaccatcgggctgtaaaaaatctttaagtgttgttccaccttgaataatggcttttctcaaaacatctttaatcgtgttcactaaagagaaacattgattgcgagtcaaatttttagcgagtttaaggggatgaatgccacaaataaacaaactttcattcgcataaatatttccaacgcccactaccacagcgttatccatcaagaaagttttaagtgcggttgatttttgacgagattttttgaataaatattctgcattaaattcatcagaaagtggttcagggcctaactttaagaaaagatgaaagtcatctagattctccgtccacaaccatgcaccgaaacggcgaggatcgttatagcgtaataacttgccattattcattacaatatcaatatgatcatgtttatctattgcgctattctgtggcacaattcgcactgaacctgacatgcccaaatgcccgatgatatagcctttttccgtgtgaataatcaaatattttgctcgacgagtgagatcgacaatttttacatttttaagggttatcaattcctctgatacagcccagcgcaatttaggctggcgcacgacaactttctcaatcgtaaaattcttaagataagggctaataccacgtagtgcagtttcgacttcaggaagttccggcataattttcaacttagtaagtggatagaataatgatataaagtgcggttagttttaccattttttatattctttgaaaattaaaatgatgaatatttcaaaaatataggtagttatctaatggataaaatttatatatctcgtttgatctatgttaaaagatttttattttacagaataaccgcctgttttcagatacaagcggttattttttgtgttaattgactaactaattaatcaatgggtggtgtgtaagtgccatttttgatgtcgtctttaatacgatttgcttctgttagtacttgagttaataacgctttaacattttccaatgttgcaatcgggcttagggtagtcattttcagcgattgtttgtcgcctactttagtcacgccaatatttgcttcgcctcgtgcaaagagttcatctgccacgttttggtttagtgcatcaataaattcagctggatagtcttttggtacgacacggaataacaccgatgcaaactgacttggcacaagcatctctaagtcaggggtatcgttgatgtattgctcgacttctttggtcagttttacgccgtgatcgatcattgaagcgtaaagctcttcgcccaatgcttcaagggtaaaccataattttaatgcgtcgaaacgacgtgtggtttgtagcgattttgccactaagtttggcacgccgtgagcttcatcatattccgaattgagataatccgctttgtaatcgataaagcgatagttctctggatccttgagtaaaaatgcaccacaggaaatggtttggaagaagtgtttgtggaaatcaagcgtgatggaatcagttaattcaataccatctaagaaatagcgataatctttggaaagcaataatgcgccaccccaagcggcatcaacgtgtaaccacgcttgatattcatcggcaagtttgcggatggcttttaagtcatcaattgcgccagcatctgttgtgcctgcggtagcaacaatacaggcagtaattttgccatcagctttaagctgtgcaagtgtttgtttaagtgcaataagatccatttgtgcattggcatttgatggcacagtaacgactgattggaaacccatgcccatcattgccatatttttttgtacagagaaatgtgcgttttctgaacaaatcactttcactttttgcatcgcttctgctggaataccatcacgttgtactgaccattcagagccgtcttcgtttttccagtggtttgcaatcgcccaatcgcgtgccaacaatacgcccattaagttagattgagtaccaccagaagtgaacacgcctgatgtgccttcgccatagcctgctttttggcgtagccagttgatcaaatgctcttccataatcgaacccgctgggctttgatcccacgaatccattgattggttggtcgcattaatcagtacttccgcaatttggcttgttaccatcgttgggcaatgtaaatgggcaagtgagtgtggatgatgtactttaaggcttggattaaggaaaatttctaccaaatgatcgagtgatttctgtacacccataccctctttcgtcggattaaaaccgcttattaaggctcgcatttgtttgattgaaccgcccgtgtacattttttcatttttcagccaagcagagaccgcttgcaccgcattatgcatcgctgtttcataatcgttaatggcttcgttatcgttgcaaaacaaagcttgtttgtgttgtttgaggtttgacataattattcctagatatgaattacacccaattttctgtacgtaatgctataactcgctcaaattctcttaaattgttactaaccagaattaacccttcactacgagcatgagccgctatatgaatatcattttcgccaatcaatttcccttgtttagagagttcagctttaatattgccgaaatgagctgcatgctttggttggtaatctaaaatggtgaggcgtgataagaaatcttcaataaccgcaatgtttctttcgggatattcgcttttttcagctccataatagagttcagccacagtaatgctactcacgcacatttttcctgcattttgattaaagcgagaaagaatttccaatggcctacgcttaatcacgtaaatcacaatgttagtatcaagcatatatttcaacactataaagcctcacgctctggttgaaatgcaatttctcgttcattcataaaatcatcgctaactgtttgatcattcaagaaaaaactatcccaagattggttgagaggcgacaaaatccgatcactgcccgatacacgaaccgataattttttgatttcttcagaaaagcgaacttcagcgggcaaacgcacagcttgacttcgattagtcataaaaacagaggcttcaatcatagttattccttatgcttaattgtatatagcataagtatatcccagttttatacagttgagtagaaaaaaggtgggatttccctaccattttgaatttacaagcggtcaaaattcgcaaaacatttgcaaaatcagaccgcttttaattaactacgcaccactttcaatgcgtctacaacagattgcttgaaacgtttgataaattcttcgcattcattttggttgatgtttaccgcacaaagcacacgaaccacgttaccaccgcgtccgccacgttcgagcaagagtttgtttttgaagcaagctttttggattgctgccgctaattcacaatcgcgcgggtaagcccctgtcgcatctttcgattggcgttcgtctacaatatcgatccccatcattaagccacgaccacgtacgttgccgatgcacggatattctttgcttaattcgcgtaatgcgttggttaagtattcaccacgctcttgggcattttgtgcgaggttttcatcacgcataattttaagtgaagcgtagcctgtcgccatcgctaattgattgccacgaaatgtacctgtatgtcctgcaggttgccaagcatcaaattctttacgaatagctaatacagctaatggtaagctgccaccaactgcttttgacatcacaataatatcaggctcaatgcctgcgtgttcaaaggcgaacattcttccagaacggcagaagccagcttgcacttcatcgacgatcattaaaatgccgtgtttttgggtgacttcacgtactttttgtaagaagcttattggtgctggaacaacgccgccttctccttggattgcttctaaaattactgcagctggttttactacgccactttctacatcttcgatgaagttttcaaagtattgttcaactgctttcgcacccgcttcgccaccaatgccaaatgggcagcggtattcgtgtggatatggcataaattgtacgccaggcattaaattttcaacggcattttttgcaccaagattacccgttaaggctaatgccccttgggtcataccgtgaaaaccgccagagaaagcaatgatattgccacgtcctgtgtaagttttggctaatttgatggctgcttcatttgcatctgcaccagaagggcctgtgaattgtaagatatatttatctttcgggaagaatgacaataattcttcactaaacgcatctttaagtggagtggttaaatctaaagtgtgtaacggcaatccgctatctaatacgtctttaatggcttgcattaatataggatgattatgtcctaatgcaagggttcctgcgcctgctaaaaagtctaggtattcattaccttcaacatcagtaacccaacagccttgtgcttttgcatatgcaaaaggtaatttgcgaggataactacgtacgttggattccattacatcttggcgatctaaaaaatgttggtttgaagcaagaattgcttgtacaggggtaatcattgtcatttttgattaaaaccttctaaaagaggtgaaaaaaataagtcgggtgccttgcgataaatttaccgtttataaaacagacacatagggcatttgactcgctacttattaaaaaaagcgtttcagcttttttgtttttaccctagtttgcccattggacgggctaggttggaaacaggttttgatgtagggttacgtcaaaacggggacaattgtatattttttttgcaatatgaaaagcaaatttagcttcttacgagtcaaacggctaaataaaaagcaaacgtttctaataagaacaaataaaaaacccgagtttctactcgggtttaaaataattaaatcaatattatttgatttttgcttctttatagataacgtgtttacgcactactggatcaaattttttgatttccattttttcaggcatattacgtttgtttttatcagttgtgtagaagtgaccggtctctgcagtagaaactaaacggattttctcacgagcacctttagctgccattttttagctccttagattttttcgccacgagcacggatttcagctaatactgcatcaatgccttttttatcaatgatacgcatacctttcgcagttaaacgtaaggttacgaaacggttttcactttcaacccaaaaacggtgagtgtgaaggtttggaagaaaacgacgacgtgtcgcattcattgcgtgtgagcggttattacccacagctggacgcttgcctgttacttgacaaactctagacataataatctccaataattaaatataagctcgagcttacggttcggattgtttaaagctggttaaacctagcttgctacctcgtcaggtcgcgctaatccgacccgcttactatattaaaggtcgcaaattatactgactttgttttcatttctcaagtgtaaatgcgattttcctgaatgtaatcggtaaaaaaatggtcaatattataaaaatttataataaacaattctccgcgaaagaataacaatcgcttttccctacaattaaatgatcaagcacgcgaatttccattagttcagccgcatcttgaatttttttagtaataagctgatccgaataactcggctccgttatacctgaaggatgattatgtgccaaaattaaagctgccgcattacaatagagtgcttctttaataatttctcgcggataaaccgctgatacattaattgtacctaaaaataaccgctcttttttaatcaaacgatgttgattatctaaaaataaaaccataaatacttctctttcctcgtgttgcaattcagtgagtaaaaaaagttttaccgtttcaggatcattaataatcggcgtacttaacatatcttgctttaaataacgcttggtcatttccgtaatcgcttgcagttgaataaattgcgtaatacctaagccttttacagaacagaaagcttttttatctgcggaaagtaaagcgtgcaaggagccaaaatgcgttaatacatttttagaaagtgacataacaggacaacctttgataccagtacgtaaaaaaatcgcaagtagttcataatcacttaatgcttttgctccgaatgccagcaatttttctcgtggcattaattcatcattgttttccatatatttagaaaagaaaaataagaaagattttgaccgcactttttaggtttgacgagcaagtgattcaaaatctgcgatgcatatcgtaaaaatagcgttgggcattcggcaaaattcaagtaaaatggcgaaattgtggttaagtactaacaagggaagaaaatgaatttaaacggaaaacgtgttgtcgtcggtattacgggcggcattgcagcctataaaacaatagagttgattcgtttattacgcaaagcagaagctgaagtacgtgtagtattaaccccagctgcggcagaatttgttactcctttaacgcttcaagccatttctggcaatgctgtcgcacaatctttacttgatccacaagcagagctggcaatggggcatattgaacttgccaaatgggctgatgccattattattgcaccagctagtgcagactttattgcccgtcttactatcggcatggcgaatgatttactttcaacaatttgtcttgcaactgatgcaccaatttttcttgcgccagcaatgaatcagcagatgtatcaccaatccattactcaacaaaatttaacgactcttcaaacacgtgggattgagcttattggccccaatagtggttttcaagcttgcggcgatatggggaaagggcgtatgtcagaaccagaggaaatttttaccgcactttctgactttctctatcaaaaacaagatctacaaggattaaatgtcgccattacagcaggcccaacgcgtgaggcaatcgatcctgttcgttatatttctaaccatagttcagggaaaatgggatttgcgattgctgaagcatttgcaaaacgaggagcgaacgtcacgctgatttcaggccccgtgaatttaacaacaccaaaaaatgtaaatcgaattaatgtcatctcagcacaagaaatgtggcaagcctctcttgaaagtgcggtaaaaaatcaaatttttattggttgtgcggctgtcgctgattacagagtatctgaagttgcagagcaaaaaatcaaaaaatctggcgatgaaatatctatcaaattaattaaaaatcccgatattatctcagatgtaggacatttaaaaacacatcgtccttttactgttggatttgcagccgaaacccaaaatgttgatgattatgcaaaagataaacttgaacgcaaaaatcttgatatgatttgtgccaacgatgtatctggcggacaagtttttaacgcggatgaaaattccttgcagcttttttggaaaaatggtcataaaaaattatcgctaaaatcaaaagtagaacttgccgctgatttagtcaatgaaatcatcgaacgctatcaaaaaaccttataattccaaccgcacttttacctaaaaatgaatttcaaacggagtattaaatgaaaaaaattgacgtaaaaattttagattctcgcattggaaatgaatttcctttgccaacttacgcaactgaaggttcagcaggtcttgatttacgtgcgttgatcgatgaaagctttgaaattcaaccaggcgaaaccaaattaattccgacagggctatcaatttatattgcggatcccaatttagctgccgtgattttgcctcgctcgggtcttggccataaacacggcattgtgttaggaaaccttgtgggattaattgactccgattatcaagggccattaatggtatcaatgtggaaccgtggaaatgaaccattcaaaattgaagtcggcgatcgtattgctcaacttgttttcgtgccagtagtacaagctgaatttaatattgtagaagattttcaacaaaccgaacgtggagaaggcggtttcggtcattcaggtaaacaataatttatggtagaagaacaattatctttatcaggcgtagaagaaattgcgcctaaaattgaaacaccgaaaattgaaaaaagaacggtaaaagaacgtcgtcagcaagtgcttacagtattgatacatatgcttcattctgaacgtggaatggaaagaatgacaaccgctcgtctagcaaaagaagttggtgtgtcggaagctgcgttatatcgttactttccaagcaaaacaaaaatgtttgaagcactaattgaacatattgaaagtactttgctgagccgaattacagcgtcaatgcgtaacgaaactcaaacaatgaatcgcattcacgacattttacaaacaattttggattttgcccgaaaaaatcccggcttaacacgtgttctaacaggtcacgcgttaatgtttgaagaagcgcaattacaagcacgtgtggcacaatttttcgatcgtcttgagatgcagtttgtcaatattttgcaaatgcgtaaattacgtgaagggcgtgctttcaacgtggatgaacgtataattgcctcacatttagtgacactctgcgaaggacaatttatgcgctatgttcgtacaaatttccgtctgaattcaagtcagtcttttgaacaacaatggcgttttatagagccactttttgcctaattgactttaccgagtaaatatatgattattccttggcaagaactagaagcagaaacattagataatatcgtagaaagcgtgattttacgcgaaggaaccgattacggtatagaagaactttcactcaaccagaaaaaacaacttttactgactcaaattcgcaatggaattgcgttgattgtatggtctgaattacatgaatccattgacatcaaaaataaaacggaatttttgaaacaggaatgtaaggagcaagaatgtcaaatgaattaaccgaaattgatgaagttgtaacctcctctcaagaagaagcaactcaacgagatcccgttttagattggtttcttactcactgccatttgcataaatatcctgcaaaatcaactttaattcatgctggggaagatgcgaccacgctgtattatgtaattaaaggttctgtaatggtatcttcaaaagatgatgaaggcaaagagatgatcctcacttacttaggtgcaggacaattttttggcgaagctggattatttgatgaaggttcaaaacgatcagcttgggtaaaaacaaaaacaacatgtgaaattgctgaaatttcctataagaaatatcgccagttgattcaggcaaaccctgaaatcttaatgtttctcactgcacaattggcaagacgtttgcaaaatacatcacgtcaagtcacgaatttggcatttttagacgttgcaggtcgcatcgctcaaactttaatgaacttagctaaacagcctgaagcaatgacgcatcctgatggtatgcaaatcaaaattacacgccaagaaatagggcaaatggtgggttgttcacgagaaactgtggggcgcattattaagatgttggaggatcagaatcttatccacgctcatggaaaaacaatcgttgtatatggcgcaagataatttttcatcataatttattcaaaataaagccatccgaaattaatttgggtggtttttgtttaattggaaataatattcaaaacattaattgacaattaatataaaggattttattattgccccacttcttacggatattgtaggaagacaggattggtctcctgatatagtggctttaaaggtttaaaccttattgcatagttttatgctgcaaaagctaggacaccgagatgcattttttaatctatggtggactgggtagaaatcccgcagggatgcgtgcagtaagccacttgctgttaagaccaattctgcttagttccaccacccttctttcaaattccctagccttttctagcttaccttaattaatcttttttctttctagtaaaactaatacttcatagtgagatgtttgcggaaacatatcaaaaagttgaattttcaatggtttataacaagttagatgctgtaaatctttacccattgtcatggcattacagctggaatacaagataaagtgcggttgaatttggttgagaaattcacttaattcctttccaattccacgacgcggcggatttacaatcacaagatctggcttattttcatttttattttcaatcacgcttgctgcatttagagattggaaatttacatgttctaaacctaatattttcgcagaatgactggctgccaaaatagcagaggaagaaatttcaattcctgttaatttaatgggttttccccatttttcctgcaacgctttagcacaatgtaagccaaatccccctacgccacaaaataaatcccacaggttataaatagggaattcagccacccattgttgagcagttgcatataaacctgcagccactttagggttagtttgaaagaagccttgtggacgaataaagagtggaataccgttgaaattttcaggcaaaaattgttgttctgtcagaaaaatttcttgttcgccctctaaaatagccgcgtgctgtggttgcaaattaatactaatcacttctaagtgcggtaatttttccaataatttgggcaattctcgacgaattaatggcaatttattttctgtacgtaacacaaaacgcaacatcaatttttccgtcgcgatactttctgtcagcaaaatatatttaagctcgcctttttgtttagcaatgttataaggtactaaacctgcgcgaccaataaaatctttgagaattgaaaaaattactgaaaaatgtgtaggataaagaggacaatcacacaaatcaatcgcactttgtggatcattaggattttttaaaatgccaagtattgggcgttcaacactaccactaacaaccattttagctttattacgaaagccttgttcattagattgaaaaggagccacccattgagcttcatcgtaattaatagaaatcagttgctgctttaaatgatattgtttttcagttagctgctgactataaggtatttcaagccattggcaagaacgacattcattttgttgatagtatcgacaatcaatcatttttttgctgcctgaatatctagccaacggctttgaatatctgcgagatttcggtgattcagtttccaacgttgatctgaaattaagtcgttccaattaatcactctacgtttgaataaactttgtaagcgaacttgacgagccataaagtgcggttcattttcagtaagttttagattatctaatacttgaattacgccctcacgttcattacacagtaataaaagatcgcaacctgcattgagtgcttttttactacgctctacaaaattccccattactcccgcgcctttcattcctagatcatcggaaaaaattgtaccttggaaatttaatttcttgcgtaaaatttctttcaaccaatattttgaaccacttgcaggctgactatcgcattgagaataaatcacgtgagcaggcataatcgcatcgagtttattttgtgaaattaactgttggaaaggttggagatcgcaactaaaaatttcgtcttttgaacgatcatcataaggcgtttctaaatgagaatcggctaatacatgaccatgaccaggaaaatgtttacctgtagatgccatacctgcttgatgcataccatcaataaaagcggtggctaaatttaccgcactttttacatcagatgaaaaactgcgatcaccaatcgctcgacattcatgccccaaatccaacacaggagcaaaactcaagtcaatatccaaggcaatcatttctgctgccatttgccaacctgcttctttagcaaaactcacttgttcagttgctgacagtgtttcttgaaaagcctgcattgaaggcaacattgtaaatccatcacggaaacgttgaactcgtccaccttcttgatccaccgtaatcaataaaggctttttcactcgttggcgaacagaacgaattaattcttgaatttgttctctgttttcaaaatttcgagtaaataaaattaatcctgcaacaagagggtgagaaagtaactcaacttcctcttgttccaactcttttccgtttaaatcaattaacaacgagctcataaattattttaaataaaggcgataatttttactttctacagtaggtttagttaaatcaattgatttttgctcttgtggttttagcaaaaattgagcggaatagctttcttgctgattttcccaaatttgggttacccctaaatgatcgtaccaatacaaatggtaacttatattcaaaagttgctgacttttattttttataaccgctgatttttgagtcgtttcaacttgaatcaaaggcgaaagagacgacgtaatattcaaaatcggctttgttgaataagttaagttttgttctgaacttgaacaagccacgagcataaagctcgctaaaattagaaaatattttttcattatttcgctaacattctacctaaaggttctccaccaactaaatgcatatgtaaatggaatacttcttgcccaccatgtttattacaattcacaattaggcggtaaccatcttccgcaacaccttcttctttagcgagtttagccgctacgctaaataatcgacctagtgctacttcatcttgctccgtcacatcattcactgtgggaatgactttatttggaataatcaaaatatgtgttttagcttgaggggaaatatcacgaaatgcagtgactaattcatcttgatagacgatatttgccggaatttctttacggataattttactaaaaattgtttcttctgccattgtttgctccctataaaaaagtgcggcgaattaacctgtccataattgttgcttatttagtctaacttttaaggacagagcaaaacaatcgcactttttgttttacaatgaatttaattatgcaaagtgtcgaacttctccattgcccactacattttctacacaacgtgcacaaagtgttggatgttctgggcttaccccaatttcgtcagaataatgccagcaacgagggcatttttctgcgttagaacgtgttacgcttactgcaataccctctaattcgctgtccgctaaatcagcaggtttttccgataaagattttacatctacttttgaggtaattaatacgaaacgtaattcattgcctaattgtgctaacaatgcacgatattcgtcattagcataaacggtcacttctgcttctaaaccgccgcctatttctttattgttacgagaaatttctaatacacggtttacttctgaacgaactttaatcagttgttgccagtaagcatcatctaatttttcatcctcgcctaaaccaaataagccttgatagaattcttcagtaaatacgaattccgcacgagcactttcagtttgtggcaagtgttgccaaatttcatcggcagtgaaagataagatcggtgccatccaacgaactaatgcttcagcaatatgccataacgcagtttggcaactacgacgcgcaaggctgtctgctttggttgtatattgacggtctttgataatatctaaatagaatgaccccatttctaccgaacagaaacgcattaaacgttgtaccacagtgtggaattgatagttatcgtatgcatctttaatttcattttgtgcatctaatgcacaagctaccgcccaacgatctaggctaatcatttcttctggtttgactaaatcacgttttggatcaaaaccattcaagtttgctaataagaaacgagcggtgttacgaatacgacgatagctgtccgctgcacgttttaagatctcatcagaaacggtcatttcacccgtataatcagtagaagcaacccataaacgtaaaatatcaccaccgaatttatccatgacttcttgtggtgtcacgatgttaccgatagattttgacatcttacggccttgcccatccacagtgaaaccatgggttaatacttgcttgtatggtgctttgctatctgttgccgtagaaagcattaaagaagacataaaccaaccacggtgttggtcggaaccttctaaatacatatcaatatcttgaccattaaattctgggcgatttgcaacaacagaagaataggttgatcctgaatcgaaccatacatcaagggtatctggcactttgcgataggtttctgcatccgcccctaataattctttttcgtctaaatcccaccacgcttgaatacccgctctttctacacgtttcgccacttcttcaagtagatccaaggtacgcggatgaagttcttcggtttctttatgcacgaacaaggtcatcggcacaccccaagtacgttggcgtgaaatacaccagtctgggcggttttcaaccattttctcgatacgtgcttgaccccaatctggaatccagcgaacttgtttgatttcgcctaatgcttgttggcgtaaaccttgcgtttccatgccgataaaccattgcggtgttgcacggaaaataattggggttttgtgacgccagcagtgtggatagctgtgtttgattttttcaacttttaataagttacctacttcttgtaatttttctatcacaagcggatttgcttcaaatacacctttgccagcaaagaattcggtcgttgaaataaatttaccatcattcgatacaagacccgccattggtaaatcatattgtttacccacgataaagtcgtctaaaccgtgatcaggtgcggtatgtactaaacccgtaccgccatcagtggttacgtgatcgcctaaaatcactggcacagtaaaatcatagaatggatgatggaaacggcttaattcaagatcagcaccttttactgaacctaaaattttaacttgttctacgcccacggctttcgccacagattccactaattcagcagctaaaattacacgctcatcgccaagttggactaagttgtattctaagtctgcattcaccgcaatcgcacggttagacggcatcgtccaaggtgtggtagtccaaatgatggctgataatttaccttgtcctctaccttgtgcagaaaatttagcttcaatttcatccgcactttccgcagggaaacgaacgtaaattgacggagaaactttgtcttcatattccacttctgcttctgctaaagaagaaccgcaatccaaacaccagtgaactggttttgagcctttatacaaatgaccattttcaatcactttacctaaagtgcggataatattcgcttcggtatcgaaattcatcgtgagatatggattatcccaatcgcccaacacacctaaacggataaagtctttcttttgaccctcgacctgttccgccgcgtattcacgacatttttgacgaaattctgccgcagaaattttctcgtttggtttacccactaaaccttctacttttaattcaattggcaagccgtggcagtcccaacccgggatataaggcgaatcaaaacctaacgccgttttggatttaataataatatctttcagaatcttgtttacagcgtgaccaatatgaatgttaccattcgcataaggagggccatcatgcagaataaaagattttttgcccttactcgctttacgaattttttggtaaagatttttctcgtaccaatttttcaacatatcaggttcgcgcttagctaaatcgccacgcattggaaagctggtttccggtaggttaagagtgtttttgtaatcgactgtcattttattttccaatttttacattttaaaattaactgttaaaaaacgctttcgcagtttctacgtctttctcaatttgcactttcaaatcatcaaaagaggggaatttaatctcgtttctaatcttgtggcagaattccacttccaccatttggccataaatattctgagaaaaatcaaataaatggacttctaataattgcattaatccatttatagttgggcgttttcccatgtttgccacgccgttaaaaatctcccccgattttaaccgcacttttacggcataaacgcctttgattggatttacttgtctatgcaaacgaatatttgccgttggaaatcctattgttctgcctaatttattcccatgaatcacacgcccgaaaatacgataaggcttgccgagtaaattttctgcaagttgtaagtcatcattcgctaacgcttcgcgaatcgcagtgctactaattcgctgtgcatctagacaaaaactacggttatcttcaacaataaaaccaaaacgcttactagctgcttgcaacatggcaaaattaccttggcgttttgagccgaatttgaaatcatcgccaatgcttaaaaatttcacatgtagatgattaacaagcgtttgttcaataaaaacatcggctggttgctcggcaaaagtgcggtcaaatttcgccacaattacgacatcaaccttagccttttcgagataataaattttgtcacgcaaacgcattaaacgggctggtgcatttttccccataaaatattcacgcggctgtgattcaaataacaataccgccatgggtaaatttaattcgtcagctttttgacgcaaatggcgaaggacggtttgatgccctaaatgcacgccatcaaagttgccgatcgttagtgcacaaccttgtaaaacacgatttgcattatgaagcccacgaattaattgcatgtccttatccatgaaaataagagaatttcggcattatagcgagaagttagttttttgtcagcaaatggtgcttgcgaacgcctaataaaatcaacgttgcaccataaactattgcggctaagacaatcaaccaaacaagccaataaacacgcataaagaaatccatttttgcccattggttgatttcaggcacgtaataccaaactgccgcacccattgcgattgcagccaataaaactttgacaaaaaagaccgcacttttacgtgaaaaatggtacacatccgctttggctaagccgcgatagagcaaataggcgttaagagttgcggacattgctgaagcaatagctaaaccaacatagctgaaaggaatcgccaatagattaaagcccatattactcaccatggcaataatgccaatttttactggggttttggtatcttggcgagcgtaatagccattggcgaggattttaatcaacataaagctaagcaaacccgcattaaacgcccataaagaataagaggcggcataaacatcatttagcataaaatttccacgcataaagagcgtaagtaacatcggttgagccaatacagcaataccaatggctgcaggaacgccaagtaataaaatcattcgcacgccccaatccattgtattacgaaaatcaaccgcacttttagctgaatcgccttcacgattaacgtggtggcgagcaagcgttggtaaaattacggtagaaatcgcaatgccaaataaaccaagaggaaattccaataagcggtcggaataatacagccagctaatagagcccgtcattaagaaactcgcaatcactgtatccagcaaaagattaatttgacttaccgatacaccaaataacgcagggatcattaatttacgaattttggttacgccttcatcccgccaagcccatttgggtttcaccagtaaaccggcttgtttcataaatggaatttggaataagaactgtaataatccgccaagaaaaatcccgatagcgagcgcaagatctgggttatccatttgtggtgcgaggaaaagtgcggtggcaatcatcgctatatttaataacacgggtgaaaaggacatcacgccgaattttccaatcgtgttaagcacagcgccagaaaatgccacaaaagtaacaaaccataaataaggaaaagttattttaagaagaagagaggcttgttcaaatttatgtgcgtcagggccatcattcatccaatcggtaaaccagcccatcccaaataaagcggcaacgacaggtgaaccaatcatcgcaaggatcgtaacaatactgaccaatcccccaagggtaccagaaacttttccaataaattcacgagttttattaatatcaccagattgttgatattctgcgagaacagggacaaaagcctgtgaaaaagccccttcagcaaataaacggcgaagaaaatttgggatacgattagcaaataaaaaaacgtccgccacagcaccagccccaatgagatgagcgataactacatcgcgcacaagacctaacactcttgataataaagtcatagaactaacaacaatgctagattttaaaagtcgtttactcaaaatattcttctctaccctaaaatttttgcctaattgtatagaaattttgtttttacgctatattccgtgaaaaaaaactgataaaatccgtcgcacatcgtttgtgtgagcccatattgaaagagcttgtaaaaataacgatacttactttcggttgtgtctcaccgaaatcaacacaaattttccattgacaaaagtataaaaaatcggcatattgacgccctttattttgtctatcaatcaacagaaattttaggagtttgaccttggctaatatcaagtcagcaaaaaaacgcgcggttcaatctgaaaaacgtcgccaacacaacgcaagccaacgctctatgatgcgtacttatatcaaaaaagtatatgctcaagtagcagcaggcgaaaaatcagcagctgaagcagcattcgttgaaatgcaaaaagttgtagaccgtatggcttctaaaggcttaatccacgctaacaaagcagcaaaccacaaatctaaattagctgctcaaatcaaaaaattagcgtaatttttagctagaaagaatgaaaaataaaaccgcactttaaagtgcggttttttattgcatcgaattttagactaaagtaacaacatcgatccccatttgataatatcaaagaagaatttattttgattggttgcaatgccatcagaattttttggtgtgccatcttcatttttttgcacttccaccatgccatttttatattgacctttcacgacagccaaatcatcgcgcgcttcgttacgcaacttcaaacaagactgtttagttaaaggttcaacattgcccactctggtacggaattttttaaactgatagcttgcataattcattgatttttcatcggcttggataatcttcacatattgttcgccaataattttttccaacggatagaaaaagacatattgtgagtgaatatagctatcttcttttgaaaaatgctgttgcaaaattcgagttaaatttgggtaaacgcattgttctacttgcttacttgcaatcgcccattgttttgcatgttgatcggaaagttggtaatcagccccagcaaattccgctggaattgcggattgttggctatcaaacattgaacagccagacagcaatgctgccatacctaaggttgcaattaatttcacatttgatccttataaaagtgagaatgcacaaaattctagcaatatcttcacaacagataaagcagcaaatgaatttagttttcctgatctgaaaaacttccgctataatgaccgcacttttttacgttaattaaaaggaattcttatgcaaaatccaaaagatgatgtgttatatgcgcctgttgaatgggtcgatcacagtgaaggctatagcgatattcgctatcataaatccactgatggtattgcaaaaattaccattaaccgcccagaagttcgtaatgcgttccgcccacaaacagtgaaagaaatgatcactgcattttctgatgcacgtttcgatgaaaacattggtgtcattgtattaactggcgaaggcgaaaaagcattctgttctggtggtgaccaaaaagtgcgtggcgattacggcggttacaaagatgacagcggcgtacatcacttaaatgtattagatttccaacgcgatattcgttcttgtccaaaaccagttgtagcaatggtggctggttatgcaattggtggtggtcatgtattacatatgctttgcgacttaaccattgctgctgaaaatgccattttcggtcaaactgggccaaaagtcggttcattcgatggtggttggggtgcaagctatatggctcgtttagtggggcagaaaaaagcgcgtgaaatttggttcttatgccgtcaatataatgcacaagaagcattagacatgggcttagtcaatacggttgtgccttacgctgatcttgaaaaagaaaccgtacgctggtgtcgtgaaatgttacgcaatagcccaatcgcgatccgttgtttgaaagcggcattaaatgcggattgtgatggccaagcaggtcttcaagaattagcgggtaacgcaacaatgttgttctacatgactgaagaaggtcaagaaggccgcaatgcgtttaacgaaaaacgcgccccagacttcagcaaattcagacgtaacccttaatttatcgttctaaagtgcggttaaaaatcttcgtgaattttgaccgcacttttgtattgagagcaagcatggctgaaaaatcatttaatctttaccgttattctatccccgttgatagccaacttattctgcgtgatcgttttttaaaacgccgtgaaggtttaatcgtaagagtgcgttgcagccgagacggttggggagaaatcgctccgctacctggttttagcgaagaaaccctagaccaagctcaagaacaagcaattgaatggctaacgacatggtgcaatgcaagctgtgatgcacctcgcgtaccattagatggcacctatccctccgttgcttttggtatcagttgcgcaatggatgaaatgaaaggttatttacaagctgaaggcaattatcatacggcaccactttgttatggcgatccagatgaattgtacgccaaacttgcgagtatggaaggcgaaaaggtggcaaagatgaaagtgggcatatacgaagccaatcgcgatggattaattgccgatatgtttttagaagccattcccgatttacaattacggcttgatgcaaaccgccattggtcgttagaaaaagccttacaatttgccgctaaagtcaaaccgcaacatagaaaacgtattcaatttttagaagaaccttgtaaaacacaagaactcagccgtgaatttgcagctcaaaccgatattgcaattgcatgggatgaatccgtgcgagagcctaatttttgcttggaaaaagaaccgcacttatcggctgtcgtcatcaaacccactttaattggttcaattcaaggttgtactgagctcattaaccaagcacattcgttaggcctaaaagcggttataagttcaagtatcgaaagcagtttagggctctctcagctcgcgcgaattgcacaacaatacactccgaatgtgactccaggcttagatactttagatttgatggaatatcaagtactacgcgcttggcctagttctgatttacctattgttgatttagaatctgaatttatcactaaaattatctgattcgaccaccaaaaatcgaaaaaaccagtataatgtgtcacacaaaaaggattaaaaatgtcgcaaacacacagaattttgctgttaaatggcccgaacttaaatatgttaggggctcgcgagccaaaacattatggcagtatttctcttgaatccattgaagagaaaatacaaactttagccactcaacacaatgtaaaagtggaatgttttcaagccaatagtgaagaaaaattaattaataagatccacgaaagttttcaacaagtcgattttattttaattaatcctgcggcttacacccataccagtgtagcattgcgcgatgcacttttagctgtctcaattccttttgtagagattcatttatctaacgtgcataaacgtgaaccatttcgtcatcattcttattttagcgatgtggctgaaggcgttatttgcggtttgggcgcaaaaggttacgagtttgcctttttatttgctatggattaccttgctaaaaaatagaaaatcgagcatttttggcgaaattcacagaattttatcgcaaatttgaaaaaattaaggtaatctttgcaacacaaaagtaagtttattcataaccgcactttttcctttaaaagtgcggttaaaatttcaatctttttaggaagaacgtatggacattcgtaaaatcaaaaaattaatcgaattagtagaagaatcgggcattactgaattagaagtgcaagaagaagagggtacagtacgtattagccgtgctgcgccagtaattgctccagcagccgttcaatatgctgcagcaccagtagtagcaccgactcctgccgctgcaccagctcaagttccagcagctgcgacatccgcaccagccgcatcggatgaattatcaggccatcttgtacgttctccaatggtgggaaccttctatcgcagcccaagcccagaagcaaaagcattcgttgaagtggggcaatcagtgaaagttggcgatgcgctttgtatcgttgaagcaatgaaaatgatgaaccgcattgaagcggacaaagctggcgtagtaaaagcaattcttatcaacgacggtaacgccgttgaatttgacgaaccattaatcgttattgaataatttccaatatttttgtcgggcggactttagtccgcctatttcatatacaaacaattagagcgaatttatcgtaggcgatataaattgaaatctgttcacgccaaattttatagggagaacaatatttcaagagcctacataaaaattcacgtctatctgactaaacggactcttttatgttagaaaaagttgtgattgctaaccgcggtgaaattgcactacgcattttacgtgcttgtaaagaattaggtattaaaactgtggcggttcactccactgctgatcgtgatttaaaacacgttttactcgctgatgaaaccatttgtatcggtccagcaccttccgcaaaaagttatttaaatattccagctatcattgctgccgccgaagtaacaggtgcggatgcaattcatcctggatacggcttcttatctgaaaacgctgactttgctgaacaagttgaacgttcaggtttcactttcatcggcccaacagcagatgttattcgtttaatgggcgataaagtttcagctattaaagcgatgaaaaaagcaggcgtgccttgtgtaccaggttcggatggccctgtaagtaatgatattgctaaaaataaagaaattgctaaacgtattggctatccaatcatcatcaaagcctcaggcggcggcggtggccgaggaatgcgtgttgttcgtagcgaagacgcattagaagaatctattgcgatgaccaaagcagaagcgaaagcggcattcaataatgatatggtttatatggaaaaatacttagaaaatccacgtcacgtggaaattcaagtattagcagatacccatggaaatgcggtttatttggctgaacgcgactgctcaatgcagcgtcgtcaccaaaaagttgtggaagaagcaccagctccaggtattacagaagaagttcgccgcgatattggctctcgctgtgcaaatgcttgtgtagaaatcggctatcgcggagcgggaacctttgaattcttatatgaaaatggcgaattctactttattgaaatgaatacccgtatccaagtagaacacccagtaacagaaatgatcacaggtgtagatttagtgaaagagcaattgcgtattgcggcaggcttacaactttcttacaaacaagaagatattaaagtgaaaggccatgcgatggaatgccgtatcaatgcggaagacccaaaaacattcttaccatctccaggtaaagttgcacacttgcattcacctggtggtttaggcgttcgttgggattctcatgtatatggtggttataccgttcctccgcattatgattcgatgatcgcaaaattaatcacatacggtgatactcgtgatgtagcaatccgtcgtatgcaaaatgcgttatcagagactatcattgatggtatcaaaacaaatatccctcttcatgaacttattcttgaagatgaaaacttccaaaaaggtggcgccaatatccactatttagagaagaaattaggaatgtatgattaaaatgaaacggctaattcaagatggattagctgttgtttattaaatatagttcattttatcccaatgatttataaaatgtatttgaaatgatatagaatccttatatagtttgtaactattttttttacttaagataaaaaaacaatgaaacttaatctttcgaaattcagcttaactattcttacaacggtaatgctggcttcctgtggaagtggcggcggtgataatactcaattagtaagtccaccaaaaccagctgagcaatccaaaccggctgagcaatcgaaaccagctgatcaatcaaaatcagttgaacagtcaattcttggaatgcctgaacgcttgccaactaataccggtttagcattttctataaaaacagaagatgagggaaatattaatacaattaagaatgaacaggagctcattgctactaataattttgctagtatcaatgttgatggcaaaaatatccctattgattttaaattagaaccaagtcaaggttggacaaaagaaggtgcgtttatcgaagagctgaatttagcaccacatatttgttgtggaaaatacacagatgtccgctttggtgcaattgcaagtcattcatttgggcaagatgatattcttttttataatggaaatccttcaaacagtgtgccagaatcaggagaagttacttacaagggtgaaagtataatggcggataaaggcaatagcgtatttggtggttatagaaaaggcacctctgaatttaaggttaattttggtgacaaaaaattatcaggaagtttaaacgttgatagtcctaaatatgatgttgaatctggagaaagtaaatttaataaagtcaaagttgacattaatgccgatatttcaggcaataaattttacggcagtgcaaaatcttcctcttttgtttcagaagctgtatcagagggcaagttttatggggatggagctaaagaactaggtggaatggtaaaagctaaagataattcttgggttggagcctacggtgcaaaagcacagtaataaattgtttaatcatttaaagcaagctcaagcttgctttattctttcccaataaggataaaaatgagtatacaaactaaatttattttatttctcagctcatcattatttcttaccccatattcggttgctacagaaaaatctccacaaccacatgatgggcgtttagatgagcagctacatttggccaaaccaaatttaccacaaaaaccaaccgcacttttgaccaataataatccatcaaagttatctattacaaaagaagaattagccaaacacccagacttgattattcgcggtcttatccctgccgtattacaaaataatggtgaggcagtacaacttttattaccgctatatcagcctttacctaaaaaagatccgttcttgttagaatgggctgaagcgattgatttacgagaaaaaggacatttttctgattctgttaaagcctaccgacacttattttcacaaaaaactgatcttttacctttgcgctatcaattagctcaagccttgtttctaaataatgataatgaggcggcaaaagatcaatttcaaaaattaagagcagagcaagtttcccctgattctgtaaaaataattgaacaatatctttctgccttaaatcaacgagatcaatggaaaatccaaggtggatttagttttttaaatgaaagtaatattaataatgcgccaaaagccggcacaaaaattggcaactggacagcttgggaaaaagaaagtgccagaggattttcgtattttgggaatgctgaaaaaaaatggtcattacctcacaaccactttacaaaattgtccttggaaggtagtgggaaatattattgggataacaagaaatataatgaatttaacgcgagagctggtgcaggtcttggataccaaactgcgcgatttgaagtctccttgatgccatttactgaaaaacgttggtatgtgggcggctcatcaggcggaaatgcgatgaaacaatactctaaaaattcaggtgctagattggatttatccaattggctaaatgaaaaatggcaaatttcgaccgcacttgagtatggtgaacaacgctatgaaactcgtaaacatctaaatggaaataactatctagcttccgctacgctactttacctggcgaaaagtggacagtattggtttggcggagctgattataatcgcgaaaacactcgagatttagataatgcttatcaacgaaaaaatgtccgattaggatggggacaagaatggaaagctggtatatcaactcgtttaatcctgaattatgcacgacgtgcctataaagaaaaagatcttatcggtattcgtcaaaaaaataaggaatatgcttcagtcttcactatctggcatagaaactttcatatttggggaattacaccgaaattatcttggtcgtatcaaaaggtaacaagtaatcatcctttttatgaatatgataaaaatcgaatttacgtagaaatcagcaaaacattttgaattattcaaaaaagttgtaagattagcaaacacaagggacgtatgaaatatacgcctcttataccattcaaaaaatatactttcacttataaaaatttaaggaaaaaatatgacattaaaacaacgttatcaacaagctggtaaagaagccagttgggcattgagcctatctattttatatgtaataggttggtgcttatgtgcttatttgcctaaagaaactcaaggccctatcggctttcccctctggtttgaactctcttgtatttatttgcctattctgtttattgtaattggtcattggattatcaaaattatttttcaggatatttctcttgaaattaacgatcaggggaatcaaaaatgaatttaggtattattcttcctttaattatttatctcacttttgtttttggtgcagcaatttttgcctatgtaaaacgtacaaaaggcgattttttaacagaatattatgtgggaaatcgatcgatgactggttttgtgctcgcaatgacaactgcatcaacttatgccagtgcaagttcttttgtcggagggcctggagctgcttataaatacggattaggttgggtattacttgcgatgattcaagtgccagtcgtatggcttgcattaggtgcattaggtaaaaaattcgcgctattatcaagagaaaccaatgctttaactattaatgatcttttcttttatcgctataaaaacaaatatttagtttggctatcaagccttgctcttcttctcgcattttttgcggctatgaccgtgcaatttattggtggtgcgcgtttattagaaacaaccatcggcatttcttatactcaagcattactcttatttgctttaacggtaggtatctatacttttatcgggggcttccgtgccgtcgtactgacggataccattcaaggtaccgtcatgatttttgggactataattctccttattggcacgatttatgccctcggtggtgtagaaagtgcggttaataaattaactgaaattgatcctgacttagtcacgccttacgggccaaatggaatgttagatttccaatttatggcttctttctggatacttgtctgtttcggggtggttggtcttccacataccgcagttcgatgtatggcatttaaagacagtaaagccttacatcgcggtatgctgattggaaccattgtactttcaattattatgttgggtatgcacttagctggtgcgcttggcagagcggttattccaaatttaacggtatcagatcaagtaattccaacattaatgataaaagtattgccgcctattgttgcggggattttcttagctgcaccgatgtctgcgattatgtccacaattgatgcacaacttattcaatcttcttctatttttgtcaaagatttatacctttctgcgaaaccagaagccgcaaaaaatgagaaaaaagtgagctatttttcatcaattattacgctgattttgaccgcacttttaatctttgccgcactcaatccaccagatatgattatttggttaaacctatttgcctttggcggactggaagccgcatttttatgggtaattgtactgggtatttactgggataaagcaaatgcttatggtgcgttaagctcaatgattatcggcttaggaagctatatcttgctcactcaacttggcataaaattatttaacttccatcaaatcgtgccatcattagtatttggattaattgcctttttagtgggtaataaattgggcgaacgtcgtattgaaaaaactcaattaaaagttaccgcactttaagtattaatcaatatgctgtcaccttcttctaaatgagaggaaggtgatatttaattttctcactttcagcaatttctacgctaaaacatagaattggaacaattcacagggatacatcaatgctctatcaaattcttgcgctacttatttggagcagttcattaatcgtcggtaagctcacttattcgatgatggatcctgtgcttgttgtgcaagtgcggttaattattgcaatgattattgtcatgccactctttttacgtcgttggaaaaaaattgataaaccaatgcgtaaacagctttggtggttggcattctttaactataccgccgtatttttattgcaattcatcgggctaaaatatacatctgcctccagtgcagtcaccatgattgggttagaaccgctactcgttgtatttgtcgggcatttcttctttaaagacaaagcaaaatggtttcactggctattcggtgcaatggcatttattggcgtggcaattttaattaatggcggaaaaaataatgaaggcattgataacatcagtttattcggctgtttattagtactaagtgctgggatcattttcgctgccgtattacgttggacacagcgagttgttgccaaagtttcaacgcaagcctatacctccgtcagcattgtacttggcaccatcacaacattgccatttacgctattactcacagaaaactggcaaatatcattaaattctacgggtattgcaggtttattatatcttgccattggctgtagctggcttgcctattggttatggaataaaggccttaatagtgtagatgccaatatctccggtgttttagtcgcacttgaaccgctattcggcattttatttgctgtatcattacttggcgaaacgctatcattttcagccgcacttggtataacaattattatgttagccacacttggctcgactttactgccgaaacttttaaaaaaatcggtataatatgcccccaaaattttggattatcatcattgtgaaaaaaattgatcaacaaagtttagaaaatgcctaccgtttatttgaaagcggtgatattcatcaaattgaaattggttcaacaaaagggctgcaacaaattcatcattacctatttaatggtgtttatgaatttgctggtaaaattcgtgaacaaaatatttcaaaaggtcattttcgctttgctaatgcactttatttaaaagaagcattaggaaaaatagagcaaatgccagaagatacttttgaaaatattattaataaatatgtagaaatgaatattgcgcacccttttttagaaggtaatggtcgttcaactcgcatttggttagatttagttctaaagaaaaatttaggtaaagttgtcaattggcaaaatgtggataaaactcaatacttacaagcaatggagcgtagcccaattaacgatttagaaattcgttttttattacaagcgaatttaacagatgatgtaaataaccgagaaattatttttaaaggtattgagcaatcttattattacgaaggttacgagaaagaataaagtgcggtaaaaatacgcaaaattttgaaaggaaaaaacaaatggcttggattcaaattcgcctgaacagcaccaatgagaaagcagaacaaatgagcgattttttagaagaaatcggctctgtttctgtgacttttatggatagtcaagatacaccgatttttgagcctttgccaggcgaaacgcgtttatggggtaataccgatgttattgcgctatttgatgcagaaacagatatggcagaaattgttcgcttattaaaagaagcaaaacacttagatagcaatacggcatacaaaattgaacaaatagaagataaagactgggagcgtgagtggatggataacttccacccaatgcaatttggtaagcgtttatggatttgtccaagttggcgtgatgtgcctgatgaaaatgccgtcaatgttatgcttgacccaggtttagcatttggtacaggcactcatcctacaaccgcactatgtttagaatggctagatggtctagatttaaaagataaaagcgtcatcgattttggttgtggatctggtattttagccattgcagcattaaaacttggtgcgaaaagtgcggtgggaattgatatcgatccacaagcaattctagccagtcgcaataatgccgagcaaaatggcgtggcagatcgcctacagctgttcttatctgatgaaaaaccctctgatttaaaagctgatgtcgtggtggcgaatattcttgccggccctctcaaagaactttacccaatcattagccaacttgttaagccgaatggcgatcttggtttatcaggcattttagaaactcaagctcaatcggtatgcgatgcctatacgcaaacatttgcgttagagcccgtcgcggcgagagaagaatggtgccgaattacgggtaagctaaaaacgctttaatttctttttgtcaatcaaaaaaagtgcattttttaaacaaatttcactttgcaaagcaaggcaaaatgcgtattatagccagccttgtcggttgtcgagcagttcgatataaattagatttaggcttgctaggaaaggaacgtaaaatgcgaatcggttcataccaattaaaaaatcgtgttttacttgcaccaatggcaggtattaccgaccagcctttccgccgtctttgtgcatattatggtgcggggcttacattttcagaaatgatgtccacaaatccgcaagtttggcataccgaaaaatccaaattgcgtttggcacatagcgaagatttaggtctcaatgcggtgcaaattgcaggtagtgatccactcgagatggcgcaagccgctgctatcaacgtggaatatggcgctcaaatcattgacattaatatgggatgccctgccaaaaaagtaaatcgcaaactcgcaggctctgcattgttgcaatttccagatttggtggaaaaaatcttgcgagaagtcgtgtccgccgtcaatgtgccagtgaccttaaaaattcgtacaggctgggataaatctaatcgaaacagcgttcaaatcggcaaaattgcagaacaatgtggcatacaagcattaacggtgcatggtcgtacacgtgcttgtctttttgaaggcgaagcggagtacgacaacattaaagccgttaaacaagcaattgctataccagttatagctaatggcgatattgattctgctcggaaagcaaaattcgttcttgattatactggagcggatgccattatgatcggtcgtgctgccttaggtaacccttggttatttcaagctgtggaaaacctaattgagcataactcgataagtcaaatgccaagtttaaaagaaaagtgtggtcagattttgcgtcatattcaagaattacatcaattctatggcgaacaaaaaggctatcgcattgcgcgtaaacacgtagcttggtatttacagggaattcaacctgattccgtttttaaacagacttttaatgcaattagtgatcctaaagagcagctgattgtattggaagattttttcaatttaattttggataaagaaaaatgttagaacaacaacgtaattctgccgatgccttaacggtatcagtattaaatgcgcaatcacaagtgaccagcaaaccattacgcgattcagtcaaacaagcgttgcgtaattatttagcacaattagatggtcaagatgtgaatgatctttacgagctagtattagcggaagttgaacaccctatgttagatatgattatgcaatatactcgtggtaatcaaacccgtgcagcaaatatgcttggtatcaaccgtggtacattacgtaaaaaattaaaaaaatacggtatgggataaggcgatattcttttattaacaaaaagattgaatgtttttcattctattttaaaaattagccccaagtaatttggggctaatttattattacaatttaagatcttcgatgtgcatttttcataatgcgatcttttgttactttccattcacgttctttaatatcatcacgtttatcctgttgttttttacctttggctaaaccaattttgacttttgcccacgcacttttccagtaaagagaaagtgcaactatggtaaaaccgtctcggtttgctttgccaaatagggatgctaattcgcgtttatttaacaataacttacgagtgcgagttggatcacaaacaatatgcgttgatgcaacatttaatggctgaatgcttgcgccgaataaaaaggcttcgccatttttaaaaataacataactatcactaatatttgccttgcctgcgcgcatagatttgacttcccagccttgtaattcaagacctgattcaatttcatcttcaataaaataatcgtgtcttgcacgtttatttagtgcgatagtatttgaattgggttttacttttttctttgtcataattttatcccttattttgcctgaggcattttatcggatctctattttgatagcaaaaagatcatctaggtagaactggcagtcgcatttattttcaatctttaaaaataaatgatttgtagaaaataagagaaaaactgaccgcactttttaagaaaaaacagacacattgttgtgtctgtttgggaaagataaaaagatgaattaagtgttagcgatttatatagtgaataaaggattattccaaacgttttgccactttaagccaatcagccttaaatatacgctgcatattattaatggcatcaataatatcgtgatgaacgagttgttcattttggatacctacgcaatagccgcctttgccttgtagcaataaatctactgcgtatgcgcccatacgtgaggcaagaatacggtcaaaagcacaaggagaaccaccacgttgaatatgccctaaaacggttgcgcgagtttcgtgacctacgcgagcttcaatttcttttgccagagaatgaacatcggttaaaagttcagtgattgcaataatagcgtggcgtttaccgcgaataatgctacgttcaatttgttgaattaattcttcgcgattaaattcaatttctgatgcgacgatatattcacaaccgccagcaatgcccgcagaaatggttaagtcactacaatggcgacccataatttcaacgatagaaatacgttggtgtgagcttgatgtatcacgtaaacggtcgattgcatccactgcagtttgtaatgcggtttgataaccgatggtatagtcagtacctgcaacatcattatcaatagtaccgggtaagccaacacaagggaaactgtgttcttcggttaataattttgcccccatataagaaccgtcaccaccgataaccacaagtgcatcaatgccgtgagaacgtaaaatttccgcacattttgcccgaatattaggatctttaaattcaggaaaacgtgcagaacctaaaaaagtaccgccacgattaatcacatcagatacgctatagcgatttaattgtttgattttattattgtataaaccttgataaccgtcatagataccaaatacttctaagccttctgcaagtgcagaacgtactacgccacgaattgcggcattcataccaggcgcatcgccaccacttgttaaaactgcaatttttttaatcataatttacctacttttaaccataattgaaaatgggcataagattacatcattcaaagaatctgctctagcaaaatttgacgagattttgatctacattatttttcacaaaacagttgccatttcaaattttgtaaatgctttctttctatatccacaatgtatttttgcaaatgtcgttgtactttattgacagataaatgtttagaacgcgttggttgctgtattttctgcgaatattgaaattgcacaaagccacattgggacaattgtcgtcctttcatcacattgacttgccaagatggattttctttcgttggcgaatagataacatatccatttaattcatttggattggtcgaattttttggaatagcatcgaaatggaaatcttttacgcctgtattgcgataaatgcgttctcttaatgcaatacgttctttaatagaacgttcggattgattgcgatcaaagagaatttcaatttcagattgccaattttccagcgtatctggtttagcaatatacacatagcgtgcaatggtttcgaaatcttggctgccagtaagtacataatgttttccattatattctaactgggtaggcacatttaattgtgtcagcttagttgcacagcctgaaagtataagtgcggtcaaaataacaaaaattttattcattaatatctcgcttaaagacaaattcagtttcagtggaggatgctgaatcaaaccaataaccacctaaatcaaattcttttaactgttcaatttcagttaaatgatgttgaataatatagcgacacattaagcctcgcgcttttttagcataaaaactaattactttgtatttgccatttttattatctaagaaaactggcttaataattttagcgttaatttggctttctttaacagatttataatattcatcagaggctaaatttatcagaacattatcgccttgttcatctatagcttgttgaaccgcttgggtgatcacatttccccaaaaggcatacagatcttttcctttcggattggctaattttgtccccatttctaatcggtaaggttgcattaaatcaagtggttttaaaagcccataaaggccagacagcatacgtaaatgggattgcgcaaaaatgacatcatcttccgaaagggaagcagcatctaaaccagtataaacatcgcctttaaatgcaaagagtgcagggcgggaattgttttcattgtgaatttttgtccattctgcaaagcgtgcagcatttaaaccagccaacttatcgctgatagacataagcgatgaaagatcttgcggagaaagtttacgacaaacctcaataagttgttcgctgtaatcggtaaagtgcggttgagaaacaggaaaattttttaccgcactttcaaaatcaagagttttcgcaggggagataatcgctaacataatcgtccttttatgaaaaaagaatgggcgtatcttagcataaaaatttacactaaacgcgtttatataagccattttcacttatgataagatcttgcaactcaagatcgagcaactgaacaagcaaaacatcgacgcttaaattaaattcttcagctaaatcatcaatgctcacaggcgtgtaaccaatacgcgaataaagtttcgggtggcttggtgcttctactaatcgacgaggatcaggtggaggcgtgtaattaggcacggcgatctggtcaaaatcaatttcagtttggctatggatagaatgttggtagagggtttccaaaatatctttagcattttctactaacattgcaccttgtttaattaggcgatgacaaccttgacttgattcattttgaatgtttcccggcacagcaaaaacctctcggttttgttccaacgcatatcgcgcagtaataagcgacccgcttttttctgtggcttcaacaacaagcgtgccgactgaaagcccgctaataatccgattacgacgtgggaaattagcggcaatgggggcttggtttggtaagaattcagagactaatgcgccattattttcgatgatttgtgccgataatctttgatgtttagagggatagatttgttctaatccactgcctaaaaccgcaatagtttgtccttgaatattgacgacagcttgatggcaatgtccatcaattcctaatgcaagtccactagtaatcgtaaatccagctaatgaaagttctgtcgcaaaatgttttgcccaatattctccgtaagtcgtgcaataacggcttccaaccattgccatttggcgttgtgaaagtgcggttaaatttccttttacaaataatagtggcggaaaacttgcggtctgtttcaacaaaaagggataaaaaggggaaaaataattcactaaatgatttccctctttttgtgaccacacaagtgcaggctcaataaattttgcttcaggcttgaaccaacggcgaatttgaatggctccccaccccatttgtcggaaagcaacatcatcataattaagtaattcatttaaggtaatattggacaaaattttatcaatgccaacgccgccaagtttaggcacttgcattaaacggagtaatgtgtaggtaatgtcattcatattttttcctttttatttgaaaatctagtatggaaaaaacgaaggagagaaacgattaatttaaaagcattttgcgatgcagatcgcaaaaattctttttaatgaataaaaaattgcaaaatttttcttattttgaaaatgtaaaaaatccaataagaaaaatttgttgattaggattgtattggttaaatatgctaattttattaagtttattagttaaatgtatatttgatgaagtgtaagtaggtttatttttaatataaaatgccaaaaaatagtttgacagccagttttttattcgtaatatggaaaacgttttacacagaaggatttttatttatgtttcgtattgtttctttatctctcaatctactgctctcacattttgtgtgcggctaagttgtggataaaaaaacagtcagatgtaaatacccaattttaaacccgcactttataagttgcgggttttttatctaaaaaatacaggaaaaacgcaccgcacttttggagtgattttagaggaacttttagtaagggcatttagtaaggacatttagtaaggatattgttatgacagatcgcgttattatttttgataccaccttgcgtgatggggagcaggcattaaaagcaagtttgacggtaaaagaaaaattacagatcgctttagcacttgaacgcttaggtgtggatgtaatggaagtagggtttcctgtttcttctcaaggggattttgaatctgttcaaaccattgcgtgccatattaaaaacgtgcgtgttgctgcgttatctcgagcggtagagaaagacattgatgccgcatatgaagccttaaaagtggcagaagcattccgtattcatacgtttattgcaagttccgcattgcacgttgaagcgaaattaaaacgttcttttgatgatgtggtaggaatggcagttgcagcagtgaaacgcgcacgtaattatacggatgatgttgagttttcttgcgaagatgcaggccgtacaggcattgataatatctgtcgtattgttgaagcggcaatcaatgcaggtgcaactacggtaaatattcccgatacagtcggtttttgcttaccaaatgaatacggcaatattattgctcaagtgcgtaattgcgtaccgaatattgataaagcagtgatttccgtgcattgccacaatgacttaggtatggcaaccgctaattctttaacggcagtacaaaatggtgcgcgccaaattgaatgtaccattaatggaattggcgaacgtgcgggcaatacctctcttgaagaagtggttatggcaatgaaagtgcgtcaggattttatgggtgtggatacccgtattaatacccaagaaattcaccgtgtcagccaaatggtaagccaactttgcaatatgccgattcagccgaataaagccattgtgggttcaaatgcttttgcccattcttctggcatccatcaagatggtatgttgaaaaacaaaaatacttacgaaattatgtctccagaaaccattggattgaaaaaagaaaaattaaatttaaccgcacgttctggtcgtgcagctgtgaaaggtcatatggcagatatgggttacaccgaacaagattatgatttggataaattgtatgactctttcttaaaattggcggataaaaaaggtcaagtgtttgattatgatttggaagcattggcgtttatcgatatgcaacaaggggatgaggatcgtttggtattagataaactttcggcacactccaccaaagaatatccagcaactgcgtttgttcaattgaagttggatggcgaaaaattaagtacgtcttcaattggcggtaatggcccagtggatgcggtttataacgccatcttaaatttaacgggtttagaaatcaaaatgtctcactataacttaactgctaaaggcgagggcgcagaagcattagggcaagtggatattgtggtggaacacaaagggcgtaaattccacggcgtcggtttagcaacagacattgttgaatcttccgcacttgctttagtccacgccatcaatgccatttatcgagcgcataaagtggcagatattaagaatcataaacatcattaatccaatccccctctttagcaaagaggggaaaaatacaaaaaaaaactaaccgcacttttgaagtaaaaaataggaaaaataatatgcaatcatacaatatagcagtattagcaggcgatggtatcggccccgaagtcatggcggaagccattaaggtattaaacagagttcaagaaaaatttggttttaaacttaactttaacgagttttttgtcggcggtgcggctattgatcattgcggttatccgttaccagcagaaaccttaaaaggatgtgatcaagcggatgccattttatttggttctgtaggtggtcctaaatggacaaatttaccaccagatcaacagccagaacgtggtgcattattgcctttgcgtaaacatttcaaattattctgtaatcttcgtcctgcaaccctttataaaggcttggaaaaattctgtccattacgtgcagatattgccgcaaaaggttttgatatggtggtggtgcgtgaattaacgggcggaatttatttcggtcagcctaaaggtcgtgagggggatggcgtacaaaccaaagcatttgatacggaagtgtattacaaatatgaaatcgaacgcattgcacgtgcggcttttgaggcagcaatgaaacgcaataaaaaagtcacttctgtagataaagcgaacgtattacagtcttccattttatggcgtgaaactgtgacagaaatagcaaaagactatcctgaagtgactttagagcatatctatattgataacgccacaatgcaattaatcaaagcaccagaatcttttgatgttttgctttgctctaatattttcggcgatattatttctgacgaagcagcgatgatcacaggttctatgggaatgttgccctctgccagcttaaatgaagagggttttggtttatacgagcctgctggtggttccgcccctgatattgcaggcaaaggcattgccaacccaatcgcacaaattctttctgctgcgatgatgttgcgttacagcttcaacttaaacgaagcagcagatgccattgaaaatgcggtacaaaaagtcttggcaagtggacatcgcaccgccgatttagctgatgattccacaccagtttctactgcagaaatgggtacattgattgcacaagcaatttaagacttgccttcctccgtttacgggggaaggtgcccgaagggcggaaggggggcaatctcccacccttagttatttagaaatatccccaataaacagggggacaaagtatttaaagtgcggctgaaaaacacttcgaattttaaccgcacttcccttaacgaatagagaaaaatattatggcaaaaacactttacgaaaaattatttgattcacacattgtgtatgaagcagagggcgaaacgccgattttgtatatcaaccgtcatttgattcacgaagtaaccagcccgcaggcctttgatgggttacgcgtcgcaaatcgccaagtacgtcaagtaaacaaaactttcggcacaatggatcacagcatttctactcaagtacgagatgtcaataaacttgaaggtcaagcgaaaattcaagtgttagaattggataaaaataccaaagcaacaggtattaaattatttgatataacaactaaagagcaaggtattgtacacgttatggggcctgaacaaggtttaaccttacctggtatgacaattgtttgtggcgattcacacaccgcaacccacggtgcatttggtgccttggcttttggtattggtacttctgaagtagaacacgtattagccactcaaactttaaaacaggctcgcgcaaaaagtatgaaaattgaagtgcgtggtaaagtcgcatcaggtattacggcaaaagatattattcttgccattatcggcaaaactacgatggcaggcggtacaggacacgttgtagaattctgtggcgaagcgatccaagacctttctatggaggggcgtatgaccgtctgtaatatggcaattgaaatgggtgcaaaagcaggcttgattgcgccagatgaaaccacatttgcatatttgaaagatcgtccacacgcgccgaaaggcaaagattgggaggatgccgttgcttattggaaaaccttaaaatctgacgatgatgcacaatttgacactgtggtaacgctagaagcaaaagacatcgcaccacaagtcacttgggggacaaaccctgggcaagtcatttctgtgaatgaaaccataccaaatccgcaagaaatggcagaccctgtacaacgtgcttcggcggaaaaagccttacattatattggcttggaagctggcactaatttaaaagatattaaagttgatcaagtgttcatcggatcttgcaccaactcgcgcattgaagatttacgcgcagcagcggcagtgatgaaaggccgtaaaaaagcggataacgtaaaacgtattttagttgtcccaggttctggcttagtgaaagaacaagcggaaaaagagggcttggataaaatctttattgccgcaggtgcagaatggcgtaatccaggttgttcaatgtgtttagggatgaacgacgaccgtttaggcgaatgggaacgctgtgcttccacttcaaaccgtaactttgaagggcgtcaaggtcgtaatggacgtacccatttggtaagccctgcaatggcagcggcagcaggaatgttcggtaaatttgttgatattcgtgatgtaacattaaactaaggagcagaaaatggcaggatttaaacaactttcaggcttagtcgtaccattggatgcggcaaatgtagataccgatgcaattattccaaaacaatttttacaagccattacccgagtaggtttcggcaaacacttattccacgaatggcgttatcttgatgtggacggcaccaagccaaatccagaatttgtcttaaattatccgcaatatcaaggtgcaacaattttgttggcgcgtaaaaaccttggctgtggttcttctcgtgaacacgccccttgggcattagccgattacggttttaaagtaatgatcgccccaagttttgcagatattttctataacaatagcttaaataatcatatgttaccgattcgtttaagcgaagaagaagtagaagaaatcttccaatgggtatgggcaaatgaaagcaagcaaatccacatagatttagaagcgatgacggtcactgtaggggataaagtttatacttttgagcttgatgaatttcgccgccattgtttgctaaacggtttagataatatcggtttaacccttcagcacgaagacaaaatctcagcatatgagaaaaatattccagcgtttttacgttaaaaataaaaaatgcgctgatttttcaccgcacttaatcactgaatttcattcaaaaataaagccctgtaatacacagggctttgttgtttataacgttaattcaaacaggcttattaaaaactaaaacttagttttaattctgcagttttttgtttttccgcttgtttcgcttttgttaatccgcctattagacttaatttcacattatgatatttcaatttaagccctgcgttatattgctgttggttttccacgttgtaagcaaaatcatatccatttacattaatttttccgctgccttggtttgcatcatatcgagcagacaaaattggcgtaacggaaaactcgcctaagtgataagtataacttaaatcaacttgagcaaaggctgttttgacagatattggatttactttaatgcgagcttgatctaatgcaaaatcagcgtttgataaatagctataacgcacgcctactattggcgtaataccaaaattgccaagattaaatgctttgcctgcggttaaaccaaattgtgcagtatggcgagcaaatttcgcattatgattagtttgtaatttgctttggaacttgccgtagcctaaatcaatgcccaaataccaatgattatccgcataatatttagaatagaaattaacttgtgctagagtatttttacttgttgccttatcaaagttgttactattgcgaacataagtaaacacgccacctaactgaacattgtttgagattgtttgatcccaacccagttgagtttgcgtacttttagaactaaaacgacgatattgacttgaggaataatttttgttcattgaagtattagatacccaaacgttatattgcccctcgttattcatttctaactggctaatatgttgagaaactgctttccccacatttaatgcaacaaattgtgcttttgcccttgcatcagaaagtaccgcatttgtgtttgtacttgtgagatcgcacaatgctactgtagaacgatcgttgctacttgttgtagctggttcaacattatgcggaactgagcgaacacttcttctatgtctattctttggcttattactgctttctgaattaaccgtaggttgagttgtagcaggtgttgtattctctggattttccactacagagtttccagtgtttactgttgtgctttctgtcactggttgttcaacatttgagctagtctctttcgcaggttgttcagtgtctgctgttgtatttgtttgagattgaggctcttttatattaacagtcggatcattttcacgagcaggctctgcttgcggttgaacagtttcagactgttcctgtttcggagacacttgagaagtcactttagggacttcttgagttttctctgtttctactttagccttttcttctttttctaccgtagctgtttcttttgtttcagtcgtttgagtttccttggtttcacttccactttgagctacttcatttgtttgagtattagcttttacatttgatttagcttcttttgcaacttctctattttgagctgttgtctcggttgcgtcttgctcgtttttctctactgttttactttcttgcttactattttcagccactgtttcagttgtctctgatggtgtagcaggcgcaggtggtggaactggtgcttcatcaacacgggctatttcttcattgttacttggtacgctaggcacatcagcttgaatattattaggtgttgtgatatttgtcgtatcgacagtttgatttcttttttccacctctgggttatacaaatcgtaacgtccattaacattacgtaatttatatttccaagcacctaaatcaacggtattcccaactaatgacacattcaaatgatctctttgagcttttgaagcatcaaaaagtgtgagttcattatgatttggctcgcctgttttatctgccacttgtaatgtaaagttacctgtggcggatttagttacaacaactttgtcgccttgtttattggaaagatcagttaaataatagaaagaaccgttacctgataagctattcacagtcagcgtgttatattttgtcacattgtttgaattgtctgctgaatttaaatgaatatgcccatttgctagatctaattgatgaacatcactatttcctgttaaatgccaatggctattttcggttaaacgtacttggctatttcctctgctttgaattgtgccgaataagttggctttgcctaagacaaagtttgcactttcggttaaatttacattgccgcgtagattggttggattaaagctattaagggctttatcggataacttgtcagtagtacaagtcacatagcccgtatagtcagaacgtacacaaacggtatcgcctgctttatagccgatatgcacttttgcattattagaagctgtgatatttgaagtaatactttcaacattgcgacctgaataaagggttgcgttattggttacattaatatttgttgctttaaaattgcggttaatccagtcgtcttctaccaccacttcattattttcagaaaagtgtgaatctttcttcgttgaagaaatacccgcaatatctcttgcgtgtggtgtaggtctgccagaaaggaataatgtaccttgttgaacatttaaatcgccattaaggtttgttccgcctgttaataaaaagcgattttgctcacttttgcctttaaaagtcacatttagattaccgttatttttaccttcttcctcaccaaaataaccgttaaagccattcatacgctcgttgttgatatggttcattgcatttttttgagcgtcagctttctctgttcccatatatagccaactattattgctttctcctctgttttgaggaaattctgagcgaatactagcatctttttttaatgcataataagttctgttttcttcattaaaatagagttggtatccatattttatttgccgaatggcataaggattatcgtcctctagtggttttacataatatatagagacattatttggatctgtaatcaaattatccccagtaattgtcactgtagagtgtttactggtactgtgattaaccagtctcgcaccttcatcaatatttctgatgtggtcaaaggttagtgaattaccgtttaaatctaatcgaccgcctctaaatccaaagtaaattgaatttggatctacttgtttatcatcattaagcacaagagttgagcgaccacttacaatccctacagaagcaaaagcgtgttgtcccgaaccatttgtttgttgttttaaaataacggtgccatcgcccacttttagcgaacctttattatctcctgttccttcaacaattaatgtccctttgccaatttttgctaaacgatcatattgaggattatgcactttccacgttacagtttttccttcggcaacagagacacctgctcctttccaagtagtattatcagaagtacctttaacttcataatcgccttcaaagaataatccgcctgcaccttgatcgatattattatttaaggtaagcgttccactcccttcaaatgtaacacttttcccgtgattaggtttatcttttccgtcagctaaatcaacatttaaagatttctcccctcccgtaatcgtacttgtcttgccattagaagaccaactataatctgtcttggaaccaattaaagaacctgcactatattgttcataaattttttctgcaaattcaggtttatagatattccattcctgccaagattttttgttataaccagcccagtaatcataagaaccaaggaaaagccattttcctttttctctatcatatacaaataatggggatccgctgtcccctaaaacagcgtaattagtaagtggttttttggataatatttcttttggattaatgtattcattatttgagttgccgaagccgataagcccatcgttctcgtgatttacttcataaggcgtacctgcaataccataggtataagcattaccaactaatttaagattatagccgcccgcatcgcttttctgcccttctttacctaaccataattcatagcgtgttccattttcataaataaattgagtaccactaccaagtcttacaaagtaaggatatttatctttattattatatgtccccgctgtactactatcagttgaagcctctattggtgcaacttcggtaacaaatttatcaagacgtggcatataataatcttcacggcgtttttgagcttgatcttcagtagttactgcttttccatttaatttagttggatactcgtttttttcaacggtgtaatatcggttttcttcagaggatacatctcggtgtgctttagcattgccattattcatattgccatttaagttcccaaaatgtagttcactcacgccgttactaacgtgttttacgcctactacatattgtggatttaccaacgtggcaattctcttatctacatccacaacactaaaatcaatcatcggaataccattaggtaaaacattgcctaaaggtcggttatttttatctctcacttccacatttgttgcaccaacagaaaacttccctttattctctgcaaaatcacgaaatatttgataatccacatcgtctctcactaacgcggcttctgtataaggggttaatgcgtaggcgacagtaagtgcaataaaattgagtttgaattttttatttagcatagaagctgtctttattaattaagtttaaaaagtagatttgataggacacaatttgatatacggctacaagttgattcaaatcttggctgtgttgcattgatagtttgcaagttgtcttcatttttataatgagtgggttttatagcataaatcgctcaaaacttgaattacatttacgaggtaatgataatgatttttgatattttttaaaaaattggcgtattttccaccgcacttttggctaatttaaggcgttaatgatgccattatggacagaaaacatttttttgttttccacttgcatttcttttagttgtctttgagtgatggcggtaacaaatacttgcgaaccgctttgttgtaatcgttctgccaacaaggcacgtttgtattgatctaattccgaggcaaaatcatcaattaaaaaaatacaatggcgttgcttttctttcattaaatgctcgccctgcgctagtcttaatgcgcacattaaaagtttaagctgcccacgagaaagcacatcttccactggcaatccttgtgctttgaaacgaaaatccgctttttgagggccagaaaaggtgtaatttaaggcacgatctcgttcaaaattttgttgaagaatttcataataatcagcatttttttcccatccttgatgaaagctgacattaatttctaattcaggcagaaaaagtcggcaagtttgctcaatttcagggcgtagtgcttctgcgtattcggcacgccattgacttacttgatgggcaagtttggcaagttcaacgtcccaaatttttatggcagagtaaggctgattttgtgcaagggcggcatttcgttgtttgagtaatcgattgagattgctccaagcggaatagaaacttgtttggtgatggaataatccccaatctaaaaacgcgcggcgataacttggcccgccgttgagtaaggttaagccctctggggtgattaattgcattggtaaaagatgggcgagatcggaaattttattgccatcttcaccgttaatttttactaaggtgttgccttgacgaagtttttgtaagccgatagaccattgatgttggctttcttggatttttccaaatagggtaaagtgcggttcgtcgtaagaaatgatgcgatttgtgaccgcacttttaaatgaacgtccgtgaccaagataaaaaatggcttctaataagctggtttttccgctgccgttgttgccgattagaaagttaaagcagggatcaaaatcaagatccactgctgttaaattacgaaatttttcgaccagtaaacgagaaatcgccatattataaacgcattggcataatgacgtattcgcagctgctgtcttcacagttttcaattaagcaactggagaacgcatcagttaagcacattcgcacttgattacatttaagtgcattcagcacatcaagaatataggtcacattaaagcccacttctaattcttcgccattgtaattgacatcgacaatttcttctgcttcttcgtgttctgtatttgaggcagtaattttaagctggttttccttgaaacttaaacgtacgctgcgtgcgcgttcattagataaaatagacgcacgaacaaaagcctgtttcagcatttcccaattgccttcgacaatttttgtggcattactaggcaatactcggcgatagtcaggaaagcgaccatcaattaattttgatgtaaatactgtgttttttaaatggacacgtaaattgttcgtgccaatttgtaagcgtgctggttcatcgtttgtttctaataaacgaaccagctctaacacgcctttacgaggtaaaatcacagaatgattttgtaattcttgttcaagtgaaatagtacagaccgcaagtctatgaccatctgttgccacagttcgcaataaattgccctctgtttcaaacttcataccatttaagaaatagcgtgcatcttggtttgccatagaaaattgagtggcttcaattaaacggcgtaaggtattttgcggtagttcaaaatccacttcagactgccaatctgtgaggttgggatattcttcggcaggttgggttgctagtgtaaaacggctacgcccagattgcactaatgcacgatcttgttcaaaagtcaccgtaatttctgaatcatcagataaagtgcggcaaatatctaagaatttttttgctggaatggtaaaagtgccattttcagaagatgatgaaagctgagtttgactagagagttcaacttctaaatctgtccctgtgatagtcagacgattgtcttcaatttgcaacaacacgttgtttaatacaggaatgtttggacgattactcaatacgccacatacttgttgcaacggttttaataaattttctcttgaaatgctaaattgcattgcgttctccttttatgcagacaaagtgcggattaaattcgcccaatcttcttgaatgctattgtcttgctcgcggaattttggcacttctcggcaagcgtttaacacagtagtgtgatcacgatcaaatgcacgaccgatttcaggcaaactgcggtttgttaattcttttgctaacgccatagcaatttggcgtgggcgagtgactgaacgtgcacgactttttgattttaaatctgaaaccttaattcgataatattcagccaccactttttgaatattttcaatggtaactaagcgttcttgcagagccaaaatatcttttaaggtatcacgcacgaaatcaatatcaatgtcaccgcctttgaagtcttgcattgcttttacacgatttaatgcaccctcaagttcacgcacgttggtacgcaagcgttgagcaatgaagaaagcgacttcttctggcaagttcatattatgttcttccgcttttttcaataaaatcgctacacgggtttcaagatcgggcggctcaatggctgttgttaagccccagccaaaacgtgattttaaacgttcttcaattttttcaatttctttaggataacgatctgaagttaagataatttggcgacccgtttcaaacaagctattgaaaatatggaagaattcttcttgggttttttctttttcagcgaaaaattgaatatcatccactaaaagcgcatcaagagaacgatagaattttttaaattgatccattttattatcacgcactgcttttaccatatgctgcataaagttatttgcgtgaatataaagcacacgtgcattcggtttattggctaaaatgccgttgccaatggcgtgtaacaagtgagttttccctaaaccagtgccaccatataaaaagaaaggattagccgaaggttcgcctggtgcttgagcaagtttttgaccgactgcacgtgccagttggttcgacttaccttcaacaaagttatcaaataagtgtttagtattgagatgagattcaaattttattggcgtattagattctgtttgaaaatctaccgcactttctgatctaagtgttgtatttggtgtgctttccactatcttgggtgcaggtttaaccccttcttttaaagaaatacgcagttcaggattttgtgcaagtgtctgacaaatttgctggatttgtgcgagataatgggtttccacccaacctttcacaaacatattagaagcatataaaacaatgtggttatttgatactacatcagcctgtaaaggacgaagccaagtgctaagatcgctggctgaaacttgatcttgaagttgtaacaggcaactttgccaaagatttgagagattcacaaaaggatccttgttgtttttattataaaagtgcggtcaaaattgtcggagattttacaataaatgtgtgaaaagatcttgtaaaaaatccaagtttggtttttcacttaagcagattatagaacagaaaaagatgcgccagtaaggtatagatatagcatatctagtccatctggcgcattttaatttagaatttcatttctaatgttaaggtatagtttcgtcctgatgctgcgtagcgagtatagctaccaacattttgatgttgattgaccgcaccttgtgctgtttgacgcaccgcttcccaagtaacatagcgatagttgaataaattatatatccctaatcgaagcataatatttttattcgccatgtaataacccgatacatctaagatatgccatgcccgagtaagttttcttgttgattttacatcccttgaattgttacctaatgcacgttttcctagcaattcattttgagattttgcttttgattgagtaaacattgtattaattccccaagtattacttggatgatcatagcctaaaccaatgatataacggctgggctgaatggcatcaaataaataactgcttacggaggctaaaccagcattgattttttgatctttaacttttacttggttataagcaaatgttgcataccaaccgtagggaatacgtttccataaaccattaaaatctaattgtgcagttatatttacgccaactaattttgcattttgtgcattatgatatccataattgccctttccagttccatttttactaagttcttcagcaaaggcgataagatttcgataagcattactaaaatgactgatctcaatattaccaaaatccccttttagagcgagaccaaactcttggttacgagatgtttcaggcttaaatttacctacataaacctcgtcattcttgccaccataccgccaaccatacatttcagaaaaactaggatttctaaatccagtagaaaggcgataagaaagatcaagccattccgttggttttatgacaataccagtattccaagagaaatttttaaatttaccaacactaatagttgattcattagcttttgtacgagatacgtcataccgaatacctaaacctaaatcaacgtatttccctaatgccatattattgcgtgctgcgaaataataatttttccctttaattaaccgcactttacagtctctgtaattagaggagctaccttgataattacaatgatcttgtcctgcaaaatatggctctggttttgggtataagtaaggttgtgattgcaaaccatttcttggtttaccagtttcaccaggtttccttggaatactatctgccgtagcgataacacgtcgagttaaataatctttatgctgaagcgctgaagtaaagtcatcaaaaccaagattgaagacaatttgatgagtaagccaattttgttgaatttttttctctaaattcaattgcaacatattatgtttttctttataaacatttctatcagaacgatagtatgaataaggtttatcaagtgttgggcggcaattcttacttggattaggataaagactgcaatgcgtatgtcgcatataactgtcaagtatgatgttttgttgattagcacttaacactgctttgtcaatgatgcccgctttgttcttattttcgtaaatatattcaatacctacacgctgttttctatggtgttcatcgaaataaagcccacttgcatatttaacgcctctgccatcctcaatatgttgatatgcaccatgatcttgcattggataaaaagaacgactactatcatcccgtctttctgttgggcttaaataagcgggaaatgtcatatcacggatatcaaatttttgttgtgtgaattcaaaaataccaccaatataatgttgttcagaaaaatgataccctcctcttaaaaaccaagactggctttcatatttcattggattaggtttgatacggttagcccccgtataatctgaaacgcttacggtttcgctttgggtggataaagtcgcaggtggcttggctgcacacttgtcatcaccatttggacactcaccttgtatcacaaagtatcctgaagatttatctgttgtggcgattaatcgatcataactttgtacgccttttaatgcatctttatggacttgggtttcaattgaatttcgttgagtgtaaatggctagcccttcaaatccaccttgttttcctgctacagctaaagaatgggtaaagcctttatttttgcttgaataagcatttttagtttgaattccccatgatttgtctccttctaagatatcggctgctgatttgctttgaaatgttacagaaccagctagtgctccattaccatactcagaagaactcccccccttgcttatttcgacggcctttacattttcatattcaatttcattaattgcaccagtgccagaatatcctgaacgagcaactaaagggctttgcactacataagattgcgtttgaggtaaaccatctactaataaagcaactctatttctgtccataccacgaatagaatatccagaacttgcaccgcgaccttgttctacaactgaaatccctggatcatagcgtgttagatcacgaatatttaatacttgttctcggctgatactttcactagttttgataattttgccaagtccagttacttcattatctttacgatctcttattttttctgcagtgactgagatagtttctaattctgaatcttctgtactttgagtgtccacttcagatgatatagcttcttttgtatcttttatactttgagtttctgcttttacatagcatgaaattaaaagacaagaaataatacttaggcgaaaatagggttttttagtcatttttagtattccattatttggttgtttctacttgttgtctcgcaccaaagacaactgcagctcttgcattttttgaattggatgatgaagatacggttgaggaactttcagaatttgtagctgtagaatttccgttataagtgaaataaccgcctaattcagaagccttaggtccataaaatgccccgtttactttagttgtaatattaattggggtatttttattttgactatttttaccatctattacaaaatttgttgcggttgctgtaccagtgaaggcattactactattattaaagtttgcctcaatactaaatacgggatttccagtatcgtgtcgttttaattcgcctgttagctttttctcggcaaaatcaacattaaactcggcgacagcatttttatcgcgtttcttatcaccactgggggagtaagatgtcttaccgtcagtaatataaccaaaccaactaccatgatattttgcacttcctgttttaggtatgtcgtccttgggagtacggtgacctaataagaattgataataagtgttggtcgttgccgccgtttgtttttctttgtctttgtctttgtctttttctttttctttttctttgtctttttctgtttctgtttctgtttctgtttctttttctttaagtgggtcttcataatacataccaaatttcacatagcttagattactgcaacatgcttccactttatagcgtttatttcctacagtatgatgcttactacttatgaaatcattagtatttttatcaggtaaaagtggaataggatatttgtcaattaacagataatcagcttcaccaaaacttgatatatcttccgtcttaaagtttttttcatcggttattgtattggcggttgtatcggttgttgtattagctgcggtactggttgttgcattggtttttgcatcggtttttttagtagagaaagtaattagcttgccatcaattaaggtttccttggataacgcttccttttttgtttcttccgtttctttggcactaaataccccaaaaactcggttatccgtagctaaaaatttcccccctagttcttcagcattaggcccataaaaaccaccttctaatgttccctcgctggtaaagggatgttcttcagaatctttttcggttggctttactgtacccctgaatctattactataaatatcggcatctatatcatagagttttttcttttcatatggttgattattagtttttcttttggtgtaagacagttgtcctgtcagttttttagtcccaaaatctgcactaaattcacttattaagcctatatcaccattctttgaatcattttctaaatcaatatcttctggaattgcactacgtcgataataagcgtgactgccattacttaacaaaggataacgtttgccatttttagttgcagtgatgaaatcccaagttcctttgtatttagctacaccgtttactggcaagtttgttgcagttttattaccataataaaacgcatatccatagtaacctaaataaaacttgtttttagaatcgtttaaactccacgatggagtataataaagccctgaatatacatatttttgtccatgatgcttttcgggtggatttgttgtactaggctcgtctattgagccaataaggtccgccccgtttttattgttatctttaacatccttttcaatcgtagaaagtgaggaaaaatatgatatatagtcatcttcatttaagaaactaggttctttattaccacgaagattctgagccaccaatttcatccctcctcctaaagaaggaatgaacaactttttcaaattagatttttttctttgattcgaggtatcgtcttgataacgtggtttagaagagggggtattagagacgttatctacatcaaaagacccccctccgctacaagcacttagtaaaaaggaaagtccaccagagataagaggtacagatttcatagaattatatactcatacaaaattgataataattcgcattattgatctttttttgtaataatgtcaagttagagttttttaagttcatggataaaatatgaaaaatggcgtaaaacaaatttctttcttatcattaataggcttatcattaataggcttatcattaaccaatgtagcttgggcaaaagttgcacgtcctaaaaatgatacattgacaaatacaattcaaagtgcggaattaaaaacctcctctttttcttctatgcctaagaaagaaataccaaataggcatattatttctctttccaaaagccaattagcacaacatccaagacttgttttgcgtgggttaattcttgctttatatcaaaataacactcaggcagtgcaactgttattaccactatataaacaatttcctcagcaagataatttcttactcacttgggcaaaggctattgaagcgcgtgaacaaggcgatttaactcaatctattgcttattatcgtgaattattcgctcgagacgtatctttactacctttgcgttatcaattagctcaagccctattttttaactatgaaaatgaatctgccaaaattcaatttgaaaaattacgtacagaggtagatgatgaaaaatttttaggtgttattgatcagtatcttttaacactaaatcagcggaatcaatggatatggcaagtaggcttaaattttttaaatgatgataatttgaataacgctccaaaaagtggcacaaaaattggtaattggaccgcttgggaaaaagaaagtgggaagggggtagggtattctttatcagtagaaaaaaaatggccatgggcagatcatttttttagtaaaactatgtttaatgggaatggaaaatattattgggataataaaaaatacaatgaggctactttgcgtataggtggtggtttaggctatcaaactgccttagttgaagtctcgttgtttccttttcaagaaaaacgctggtatgcaggcggtagctctggaacgaatacaatgaagcaatatgcggataaattgggtattcgtttagaaaacgtagattggctaagtaaaacttggcaaatttctaccgcacttgagtatggaaaatctcgttataaaatccgaaaacatttagatggtaattattatttcatttcatcaacactattttatttacctaaaagcactcaattttggtttgttggcatggattttcatcgagaaaatacacaagcattagataatgcttatcaacaaaagacattgagatttggttgggggcaggattggtctcatggtatttcatcacgttttacttttagttatgccaaccgagtgtatagagagaaagatttgattgggatacagcaaaaaaatcgtgaatacacaaccacaattactttatggcatcgaaatatacattttatgggattaacacctaaattatcgtgggattatcaaaaatccactagtaatcatgctttttatcgttatgataaaaatagaatttatctcgaaattggaaaaatattttaaggttgtaaactaactgttgagttatctctaacattgtcaaagtgcatacactatatttttaatattagtttgaaattttttaaaaaatttccgtttcttatttgacgaacgcacattttatgactagaattacaccctattttattcactcttaattgtatttaggtaaattaaaatgaaacgtacatttcaaccttctgtattaaaacgtagtcgtactcacggtttccgtgctcgtatggcaactaaaaatggccgtcaagttttagcacgtcgccgtgctaaaggtcgtaaaagtttatctgcataatcacaattcttagtggttaagctgaacttttcaagggagttacgtttattaactcccgttcaattcaaaaatgttttcgaacagccattcagagctagtactcccgaaattacaatccttgctagaaaaaataatcttgaacatccgcgtttaggtttgaccgttgctaaaaaacatttaaaacgcgcccacgagcgtaatcgaattaaacgcttagtacgagaaagttttcgtttatcacagcattgcttgcctgcttatgattttgtttttgtagctaaaaatggtattggaaaactcgacaatagcacatttgcacaaatactcgaaaaattatggcagagacacattcgcttggcacaaaaatcttaattaagattatccgtctttatcaaattatgattagtccgtttattggggctcgttgtcggtttgtgcctacttgttcttgctatggtattgaagcattaaaaacacacggattattaaaaggtggttggcttacgctgaaacgtgtattaaaatgccatcctttaaacgcaggtggattcgatcctgttccaccaaaaaccaataataatgatgagaaaaaataatggactcaagacgtagcctattagtgcttgcactgatttttatttctttccttgtttatcagcaatggcagttggataaaaatccacctgtgcaaactgaacaaacaacttcaataactgccacttctgacgttccggcaagttccccttctaattcacaagccatagcagactctcaaactcgtggtcgtattattactcttgaaaacgatgtgttccgtttgaaaattgatacattgggtggcgatgtaattagctctgaattattaaaatatgatgcagaattgaattcaaaaacaccgtttgaattattaaaagatactaaagagcatatttatattgcgcaaagtggtttaattggtaaaaacggtattgatacccgttctggtcgtgcgcaatatcaaattgaaggcgataattttaaattagcagaggggcaagaatctctttctgtaccgcttctttttgaaaaagatggcgtaacttatcaaaaaatcttcgtattaaaacgtggtagctatgatttaggcgtagattacaagattgataaccaaagtggtcaagctattgaagttgagccttatggtcaattgaagcattctattgttgaaagttctggtaatgttgcaatgcctacttatactggcggtgcatattcttcttcagaaactaactataaaaaatatagttttagtgatatgcaagataataatctttctattgatactaaagctggttgggttgcggtgttacaacattatttcgtttctgcgtggatcccaaatcaagatgtaaataatcaactttatacaattacagatagtaaaaataatgttgcatcaattggttatcgtggttctgttgtcactattcctgctggtagccaagagacgattacaagttcattgtggactggccctaaacttcaaaatcaaatggcaactgtcgcaaataatttagatttaactgttgattatggttgggcttggtttattgctaaaccgttattctggttattaacctttattcaagggattgtgtctaactggggtttggcgattatctgtgtaacaattgtagtgaaagcaattttgtatcctcttacaaaagcacaatatacttcaatggctaaaatgcgtattttgcaaccgaaaatgcaagaaatgcgtgaacgttttggagatgatcgccaacgtatgagccaagaaatgatgaaactttataaagaagaaaaagtaaatccacttggtggttgtttgccaattcttcttcaaatgccaattttcattgcattgtactggacgttcttagaagccgttgaattacgccacgcgccgttctttggttggattcaagacttatcggcacaagatccttattacattctccctattttaatgggtatctcaatgttcttgttgcaaaaaatgtcgccaacaccagtaactgacccaacacaacaaaaagtaatgaattttatgccattagtttttatgttctttttcttgtggttccctgctggtttagtgttgtattggttagtttccaacttaattacaatcgcccaacagcaattaatttatcgtggattagagaaaaaagggttgcattctcgtaagaaatagtcacgaacaggcaaaaagaaaggcacggaatgtgcctttctttattttgctgccgtgggtatacctactctaggtctaccccaaacaataataggttttatatgaaagaaacaatcgttgctcaagctactgcaccaggtcgtggtggcattgggattttaagggtctctgggcctttagcaacaaaagttgctcaagctatattaggtaaatgcccgaagccaagaatggcagattatcttccttttaaagatgctgatggcactattttagatcaagggattgcgctttatttcaaatcgcccaattcatttactggtgaagatgtgttggaattgcaaggtcacggtgggcaggttgtattagatttattactcaaacgtattttacaaattgatggaatccgtttggcgagaccaggcgagttttctgaacaagcttttttgaatgataaattggatcttgctcaagcggaagcgattgcggatttaattgatgcaacatcagaacaagcggtacgctctgcattaaaatctttgcaaggtgaattttctaaaaaagtaaatgaattagttgattctgtgatttacttacgcacctatgtagaagcaagcattgactttcctgatgaagaaatagatttcttggcagatggaaaaattgaagcaaacttacgtggtattattaatcagttggaagatgttcgctctgaagctaaacaaggttctattttacgtgagggaatgaaagtcgtgattgctggtcgtccgaatgcaggcaaatcgagcttgcttaatgcccttgctggtcgcgaagcagctatcgtcacggatattgcaggtacaacccgtgatgtattgcgtgagcatattcatattgacggtatgccattgcatattattgataccgcaggtcttcgagatgcaaccgatgaagtagagcgtattgggatttctcgtgcttggacagagattgaacaagccgatcgtattattttaatgttagatagtagcgatcctgaaagtgcagatttaagcaaagtgcggtcagaatttttagcaaaattaccctcaaccttgccagttactattgttcgaaacaaaattgatttaaatggcgaacaagcaagtgaaagcgaacagggcggttatcaaatgattagtctttccgctcaaacgcatgatggtgtacaacttttacgtgaacatttgaaacaagcaatgggtttccaaacaggcatggaaggaggctttttagctcgccgccgtcatttagatgcgttggataaagccgcagagcatttacaaatcggtttggttcaacttacagaatttcacgcaggagaacttttagcggaagaattacgcttagttcaaagctatttaagtgaaattacgggtcaattcacatccgatgatttacttggtaatatttttagctctttctgtattggaaaataggaagcgtaaagtgcggtcattttttggcaaaatttaaatcaaaagcggcaatatttggtggtgttttgttgataggaattgctattagctggctttgtgaggatggcgttttcactttttaagatgctaattttttacgtttagattataatcgggaaaattttatatttataacaagggttatagaatgttaattgaaaaaatgcacaatttaacaaactcaaagatttctaaatttatcttaggtttgattgctgtatcgtttttagttggtggaatgtctggctatctttttagctcaaatgatacctatgcggcaaaagtgaacggcgaagtaatttctcaacaagattttttaaatcgctataatcaagaatttgaaatacgcgcacaacgtgagggagaggcgtttgtggctcagtctgattctcctgaatttgttaccgcacttcgtcaaaacatcgttaatctaatgattgatcaagaattacttcgccaatatgttaaagaattaaaattaggcgtgagtgatgaaatgattaaacgtgcaatcgtgaccgatcctaattttcaagtaaagggtaaatttgataatgctgtttatcaacgaatattacaacaaaatcatttaacttcagatggttacgcttcaattttgcgtgcttcgttacctcttgaacaaatacaaaatggcgttgctaacagtgaatttattgttcctgctcaagtaaaaaatagtgcagaaattttctttcaaaagcgtttagctcgtttagcaactttatctcttgcagatgaaatggcaaaacaatcagtctctgatgatgaaatcaaaacgtattatgaagctaatcaaaagtcttttgttcagccagagcaggttaaagttcagtatattgatctttctgcagataacatcagtagaaatcttcaagttacagatgtagaaattgcgcaatattatcaagataataaagcacaatttatgactcaacatttagcacatattcaatttgcaaatgaacaagatgcgaaagtggcttacgaggaattacagaaaggggcaaatttcgctgatgtcgctaaagcgaaatctttggataaaatttctggtgagaatggcggggatttaggctgggtaaatgagaatgaattaccaaaagcctttgaagatgccgcagctgcattgcaggtagggcaatatagccaaccaatcaatgtggatggcaattaccatattgtgttagtgcaagaacgtaaagcgcaaagtttggagaatgtgaaagctcaaattgcagatttagttcgtaaatctttgatggagagtcgttatttttctttagaaaaacaagcgagtgataaggcttttgaagacagtaagtctcttaatactgcagcacaagcagcaggtgttaaggttcaagagagtgattatttttctcgtcaaaatgtgccagctggattaaatttccctaatgttatttacacaatattcgaatcagatactacgaatgttggtatgaattctgaaccaattaatgtaggcgattatcacacaattattgtacgtgtgttggatcgcaaagcagagggcgtaaaaagtttagaagaggctaaaatagatattgaaactttcttaaaacgtcagaaagctgagaatgcgcttaatgaaaaagcacaacaagcagtgaaaaaattaaatgaaaaccctgaatcaaaagtagatggcattaatttctcaagtgagcagacttttactttaagtgaaagtaaagatcctattttaacaaatggcatattttcaattgctaaacctgaatcaagtaaagctctttatcaagtggtgcataattcaaatggcgatgtcgttgttgtcgctttgaataaggttgaacaaggcagtttaagtgaaaaagaattgtcgcaatttggtctgcaattattgcgtagtcatcaatctgaattacaagttcagttaatacaaggattacgtgagagagcgaaaattgaggtaaatgattctttcatcaatcaagatgatgaagcacaacaatagtaggttaaattataatttgagataaattctgctcaaaagtgcggtaaatttcaccgcacttttttacttttgtgcgaaaggaagttaatgatgttcgggaaaaaaataattcattctaaaacaatatggttttattttttattgtttctcttttctatatttaccaatatgggattaggcaatgtattaagtgagaatattcctgtttcagattacgcaattttatttgttatcacggcgatttctttttattttaccccttgggttgggcgaatattaatcactgtattattcctcagcgcgttattttattgctctgctggttttttctatggtattccatctttgggtattatcgcttctgtttatgaaacgaatattaatgaaaccttggaatactacacaaccattcctttttggatatttttatttcaagctagttatatcattttgtttgttattttaatgaaattaagttttcatgttaaacaacaagcatttaaatggctaaatacggctgttatcagcctattattagttttttcttacaatcaattttctgattggaactatgcgtataaattccgtttttatcccgttcttttttattctgaatttgatcgaatgaatgatctgtatttagaacaacgtgattttctaaatcaatccgttaatgcaccttctcaatgggatattcaatcttttatgccaaaatataaaaattatattttgattatcggtgaaagcatgcgaaaagattatatgtcgttatatggctttccattgaaaaccacaccatttttagagcgtgtgaaaggcactgtttttgaaaattattattctgcagcaccgaatacgcaaccgtctttacaactcaccctatatcgagcagataaaggggaaacggtttatacggataatattatttctttagccaaaaaagcgggtgtgaaaacctattggatttctaatcaaggcaaaattggggaatttgatacgatcgcatctcgtattggtcaaagtgcagatgaaacgatttttatgaagccgttaggttataactctaaaaaagtttatgacgatgaaatgttgcctgtattagataaagccttaaaagaaaatattagcaattcaaaattaattgtgattcatttaataggctcacatcctgctttttgtgagcgtcttccatacgaggttaaaaattattttattaatcaatcgatgtcttgttatttagaatcaattaaatatacggatcagtttttagaaaaattaaattcacaattggtggcacaaaatgaaccctattcggtgatttacttttctgatcatgggcttgctcattatgaggattctaacggcctatcattgcatccaaataatctttataaacaagattatgaaattcctttcataatgttttcgagtgatagtcaaaaggtagaaaaaataaaaacgccacaatcggcatttaattttgtttatggttttgctgattggatgggaattaaggaaaaacatttacaaggcgtggatttcttccatcctgaaaaacaggaaattaaggtatttgattggaataacgttgtaaatgttaaagagttggctgatgatccagcaaaattaccagaaaccgttcagtaaatgagatcgtgctttatcatttatcggcttgtgctagaatgagcggaatttttttaaaagggaaatagtatgtccaaaaaatcagggctttcgtttttatggttaagtgcggtcgctttcgtggttgatttgctcactaaatacattgtggtacaaaaatttgatttgtatgaaagtgttaatgtgctgcctgttttcaatcttacctatgttcgcaattatggtgcggcatttagtttcttagcggatcatagtggctggcaacaatatttctttattttgttggcattggctatttcaggcatgttggtttattttttagcaaaaaataatgccgaacaaaaaatccaaaattctgcttatgcactgattattggtggggcgttagcgaatatggtggatcgtgcttataacggttttgtcgtggatttctttgatttctactgggatatttaccattatccagtgtttaatatcgccgatatcgccatttgtattggcgcagggttattagtattagatgcgtttaagagcgaaaagaaaaaagtacaagataaacaagtagaaaagtgcggtcaaaaatgaagataattttagccaatccacgaggattttgtgccggtgtagatcgtgccattagtattgttgaattagccttagaaattcatggcgcaccgatttatgttcgtcacgaagtggtacataaccgatttgttgtgaacggattgcgtgagcgtggtgcgatctttgtggaagaattaagtgaagtgcctgatggcgccatcgtgattttttctgcacacggagtgtctcaagcggttcggcaagaagcgaaagaccgcaatctcaaagtatttgatgcaacctgtcctttggtgactaaagtgcatatgcaggttgcgcgtgcaagtcgaaagggtacaaaagcgattttgattgggcataaagggcatcctgaagttgaaggcacaatggggcagtatagcaatgaagatggcggtattttcctaattgaaaaagtagaagatattgcgcgtttgccaatgcaagaaaatgataatttaacctttatgacgcaaacgacgttgtcgctagatgatacggctgaaactattgctgcattaaaggaaaaatatcccgctattcaaggaccacataaaaacgatatttgttatgcgacaactaatcgtcaagaagcggtgcgtgaattagcaaaattatcagatttagtgttggttgtaggttctaaaaattcatccaattcaaatcgtttagctgaattggcttctcgaatgggggttaaatcacagcttcttgatgatcctgccgatattcaagccgattggtttaatgatgtaaaaaccattgggattacagctggtgcttctgcgccagaggaattagttcaatcaattatttctcgtttaaaaaggtttggtgcgaattccatagaagaactgcaaggtttagaagaaaatatgttctttgaggtgccaaaagagctgagaataaaagaagttaattaatactaagggcttgtcgtaaatgataagccctttgttttttcattcaaattaagaatttttgcgatcgagatcgcaaaagtgcggtcagtttcttgagggtttttgcaaggcaggaaaaaataggtgtgttgattgctgatcaacgattcatattataaggaaacctctatgaaattaatgaaaacattattcacttcggttgtattgtatggttcgctggttgtttcttcgtcttttgctgaggaaaaagcgacagaacaaaccgctcaatctgttgtaacaactcaagctgaagctcaagtagcaccagccgtagtgagcgataaattgaatatcaacacagcaactgccagtgaaattcaaaaatccctaactggcattggtgcgaaaaaagcggaagctattgtgcaatatcgtgaaaaacacggtaattttactaatgcagaacagcttttagaagtacaaggaattggcaaagcaacactagagaaaaatcgtgatcgtataatcttttaattttctaacctccaatgaatgccctgtttcacagggcttttttattttatactaaaaataattcaacattcatttcagcgattctagcttgagcattttcgggtaatcctttatcacagataatcgtatctagtgaactaagtggatatagtagaaatgttgctactttgccatatttggatgaatcagtaacaaggatatttttttgactaaattggataatagcttttttgacaggaattttttgctcatcaggcgtggttagcccttttaaattccaagatgaagtcgagatgaacgcaatgtcaactgaaatttgatgtagaaattgggcagcaaattctcccacagaggaacgatttgatttattaatgagcccaccagtatgcataatattacattggctattgaccattaaataatgggcaataacaaaatcattagtaattacaagtagatcgtttcgattagcgatttgttttgcgatttcaagtgttgtcgtgccagcatctagatatatagtggaatgttcttgtattaactcaactgcttttttactaatagccgtcttttcagtcgttgctagtaatgatttatcgtcatgtgttggttcactggataaacgttcaagtaattgaaccccccctgaaacagagatgacttttccatcctcttcgagcttttgtatatcacgacgtacggtcatatgcgatacgcctaagatattgactaagttatttatactaataacgctttgtttactaattaagtttaataatgtcttttgccgttctgcaggaatcatctttttctccatacctgatttcaaatcagattatgagctcataacgttttatcactaaaattaacaaannnnncattccattcattaattaattaatgaatgaatgnnnnntttaaacccagttgcacttgaaaaactaaaagcggcaggtgcaaaagctgtagcggcaaatggctatgacttcgctcacgaacttgatgctgtagtgattttagtggttaatgcagcccaagctaacgcagtattatttggcgaaaatggtattgctaaaaaattaaaagcaggtacagcggtgatggtttcttctaccatggcggctcaagatgctcaaataatttcacaaaaattaacagaattaggtttgattatgttagatgcacctgtttctggtggtgcagctaaagcattaaaaggtgaaatgactgttatggcatcgggttcaaaacaagcatttgagttgttacaacctgttttagatgccactgcggcaaaagtttataacattggtgaagaaattggtttaggtgcaacggtgaaaatcgtccatcaattattagctggcgtacatattgcagcaggtgcggaagctatggctcttgcctcaaaagcgggtattccacttgatgttatgtatgatgttgtgaccaatgcagctggtaactcttggatgtttgaaaaccggatgaaacacgtagtagaaggtgactatacgccgctttctatggttgatatttttgtgaaagatttaggtttagttaatgacactgcaaaatcacttcatttcccacttcatttggcaagcacagcctattctatgttcactgaggcaagcaatgcgggttatggtaaagaagatgatagtgcagtgattaaaatttttagtggcgttaacttaccgaaaaaaggagcgtagcgatgttaggtgttattgcagatgattttacaggcgcaagcgatatcgccagttttttggttgaaaatggcttaagtacggtgcaaatgaacggtgttccaacacaatcgttaaacagcaaagtagatgccattgtgatcagtctaaaatcacgttccaaccctgtgaatgaagccattgaacagtcattgagggcttatcaatggttaaaggaaaatggttgtacgcaattttattttaaatattgttctacctttgacagtacagcgaaaggcaatatcggtcctgtcacggatgctttactagatgaattaaatgaagatttcaccgttattacaccagccttacctgtaaatggtcgcactatttttaacggctatttattcgtaggtgatgtattgttgagtgaatcaggcatgaaaaaccacccgattacaccaatggtggacgcaaatttaatgcgtttaatggatgcacaagccaaaggcaaaacaggtttggtggcgtatgctgatgtgattaaaggggcttcgcgtgtgcaagagcgctttgcggaattaaaagcacaaggctaccgttatgcggttgttgatgctgtggataattcgcagttggaagtacttgctgaagcagtggcggatttcaaattggtgacaggcggttcaggcttaggagcttatatggctgcacgtttaagtggtggcaaaaaaggcaccaatgcctttacgccaactaaaggtaaaaccgtggtgctttcagggtcttgctcagtaatgaccaataaacaagtggaaaaatatcgtgaaaaagcaccgcactttcaacttgatgttgagcaagccatccataatgaaaattatatagaacaactttatcagtgggtaatagcaaatctcgatagcgaatttgcccctatggtctatgcaacagtgccaccagatgcattaaaagctattcaacatcaatttggggtggatcaagcaagccatgccattgaaagcactttcgccaaacttgccgataaattaaaacaatatggcgtaacaaactttattactgctggtggtgaaacctcaagtattgtggtgcaacaacttgattttactgggttccatattggtaaacaaatcgccccgggtgtgccttggttaaaagcggtagaagaagatattttccttgcgcttaaatcaggcaatttcggcaaagaagacttttttgaatatgcacaaggaatgttcctatgacggatttagcacaaaaagaattaatggtgcagctcggacgttctttttatgagcgaggttacaccgtgggcggtgcaggtaatttatcagttcgcttagatgacaatcgtgtgttagtgacccctacaggttcttcactcggtcggttaagtgtagaacgtttatctgtattggatatggaaggtaatcttttagggggcgataaaccatcgaaagaagcagtatttcatttggctatgtacaagaaaaatcctgagtgcaaagccattgtgcatttacatagtacctatttgaccgcactttcttgcttagataatttggatcctaataatgctatagagccatttacaccgtattacgtaatgcgcgtgggaaaaatgcaagttattccctactatagaccgggttcaccaaagattgcagaagaattaagtaacagagctttaacaggcaaagccttcttactcgctaatcatggtgttgttgtcactggctcagatttgcttgatgcggcagataatacagaagagttagaagaaaccgcaaaattattcttcactttgcaaggacaaaaaatccgctatctcactgataccgaagtgaaagatttagaaaatagaggaaaataattatgcctaaatttgcagcaaacttaacaatgatgtttaacgaagtaccatttttagatcgctttgaagcggcggctaaagcaggctttaaatatgtcgaattcttatggccttatgattaccctgcacaagaactcaaagcaattttagataagcatggcctaaaagttgtgttatttaataccccagctggtgatgtaaacaaaggtgaatggggtgtttcggcaatccctggccgagaagctgatagccatagagatattgatttggctcttgaatatgcacttgcattaggttgtccaaatgtacatatcatgtcagcagttgtgccagaaggtgcaagccgtgaagaatataaacaaacctttattaaaaacgtacgctatgcatctgataaatataaaccatatggaatcaaaattcagcttgaagctttaagccctgaagtgaaacctaattatttactcaaaagccaatttgatacgcttgaagtggtggaattggttgatcgtgataatgtatttgttcaactcgactattttcatgcacaaaatgtagatggcaatcttgcgcgtttaaccgataaattaaatggcaaatttgctcacgttcaaattgcttctgtaccagaccgtcatgaacccgacgaaggtgaaattaactaccaatatatcttcgataaactagatgaaatcggttatacaggctatgttggctgtgaatataaaccacgtggtgaaaccgtaacgggattggattggtttcagaagtataaataaatattcttaaatttaactgcggttttaaaaacatatattatctaaggaggatacaatgaaagtcgtaattactggtggacaagggttcttagggcaacgtttagccaaaacgctattagcccagaataatgttcatattgatgatttaattttaattgatgttgttaagcctattgcgccaaataatgatcctcgtgttcgatgttatgaaatggatttacgttatccaacaggattagatgaattaattactgaagaaacggatgctatttttcatttagcggctatcgtaagtagtcatgcagaacaagatcctgatttaggttatgaaattaatttcttagcaacacgaaatatccttgaaatttgtcgcaaaaataatcctaaagtgcggtttattttctctagttctttagccatatttggtggagaactacctgaaactattttagacagtacagcattcacaccgcaatctacctatggtacacaaaaagcaatgtgtgaattgctgattaatgattactcacgaaaaggctttgtagatggtattgttgttcgtttaccaaccatttgtattcgaccaggcaaaccaaacaaagctgcatcctcatttgttagcagtattatgcgtgaacctctacatggggaggatgccgtgtgtcctgtatcggaagaattacgtttatggttatctagcccaaatacagtagttgcaaactttattcatgctttacaacttccatcacttccattgcgtagttggcatactattaatcttccagggtttagtgttaccgtaaaacaaatgttatctgatctcactcaagtaaaaggtgaagcaattttagaacatattaaatttgagttcgatgaaagcattaacaatatcgttgctagttggccttcaagaattgataacacccaggcattagctcttggtttcaaagtggatagcaatttccaaaatgttatccaacagtttattgaatatgatatgtaggaggcactatgtttggcttaccgattccaattattggattattaatcgctgtatttgttctcgtttttctcgtattaagaacgcgagttcatgctttcatcgcaatgctaattgcagcttcaattgcaggtttagtaggtggtatgtcagctgatgaaaccttaaattccatcacaaaaggatttggtggcacactaggtagtattgggattgttatcggacttggtgtaatgatgggtagcgtcttagaagtttctggtgcggcagaaaaaatggcatatagttttatcaaaatgctaggtcagaaaaaagaagaatgggcattagctattacaggttacgtagtgagtattccaattttcgtagattctgcatttgttatcctttatccagtagcaaaagctctcgcaaaaaatggtaaacgctcattattaactctaggcgttgctttggctggtggcttggttgtgacacaccacaccgttccaccaacaccaggtccattgggagtagctgggttatttggtgtagatattggtgcaatgttactcactggaatatgtatggctgtcttgcctgttgtaggaatagttctgtatgctaaatggttagataaaaaataccctaactttaatcaagaagtgttcacggaagaagaattaaaacaaaaatatgatagttatattgaaagtcgtgagaaaaaagaacttcctagtttagggctttctttactaccaattgtattaccgatagtattaatctttattaaagcagttgtacatttattcgttaaagatgtacctgaagcattgacaagtataccttatcaaatcgtttcattccttggtcaccctgttattgctttagcattaagcgtattaatttctgtttacacattattaccaaaagctgataaaaatacgactgcacttcatcttgaagaaggtgttaaaacagctggtattatcttattagtaacaggtgcgggtggtgcattaggtgcggtattacgcgatagtggtgctggaaaacaattagcagaacagatcgcaaacttacctatttcaccaattttaattccatttatcgtatcgactttagtgcgttttattcaaggttcaggtacggttgcaatgattacagctgcttcaatttcatccccaatccttgcacaaatacctggtgtcaatatgctattagccgctcaagctgctaccatgggatcgcttttctttggctatttcaatgatagtttattctgggtggttaaccgtatgatgggaattaatgatgtgaaaaaacaaatggtcgtttggtctgtaccaaccacgattgcttgggggattggtggtatttcagtaattcttgctaacttgatttttggcaacgatggctctgtatttgatctgcttttccctgttgtcgtgttagccagcattttattctatatcaaatttcagaataaaaatctttaattacggttaaaatttaatcaggagatcaatgatgtttatatatttatcacacccattagatccaaataatttagcttggccaggctaacctgtcgttgaagtgatacgttgtacagatataaatgagataacaccatttagcagttttatctctaaaataccaaatcattgcggtacacatatggatgcgtcacgccactttgtaaaagatggtttaagtatcaatgaactgccaattgggtatttttgccataaggatgttgtattacttgaagttccaaaaggcgaagcggaagggattacgaaagaagatttagagccttatgcggatattttagcacaagtatcctttgctttcttacgcacagggtttgagaagaactgagaatccattaatttatcaaaatgaaggaccatatattgcgactagtgcgggaaaatatttatccgataactatcctaatttaaaaggagtaggtatttggtttccttgcacttggttcgccgtcttctcgtgtacctgatacagaaaatccgaaaaattgccaccaagcgatcttaggttatcaatgcaccattacgcattgtcgggctagattcaagtcaacttgtattgctgaaattgaataaatgatggagtgctagggttatctctagcactctttttatatctagataggagtgaagattatgtaaaatatcaacctttatcttggtgaacttgtgggaacagcatttttttatggtgttaggacttggcgttggtgccaatatttccttaaaaaaatcaggaatgtatgggaacggtggtttacttaccgcttgtggtttgggttatcaatggtgtccattactgttatttttgaaccactcaccagtgctcatgtaaatcctgctgttactatcgatttttgggaggtaagtaaatttccaacagaacttgtgttagtctatattattgctcaatgtatcggtgcgtttattgttgctctgattgtatggctattatttaaagatcatttagatgaagaagacaatcaaaattgtcaattaggttcttttgccactattgcaacaaactctaataacttacgcaatttactttctgaaattgtcaccacattttcattgttatttattttattcacactaaatcatcaacaacctactaatggtgttgcaatgttctttgtttttacgggagtagctggtggtgttatgtcctttggtggattaacgagttatgcaatcaacccagcacgtgattttatgctgcgtcttattcacgctatcatgccaattaaaaataaaggtacttccaatttcgattacgcttgggttcctgtcttgaggcctgtaattggtgcaatattagctgcttggttatacaaagcattgttttagttttaatgtgggggaagataaggatgtagttaaatgtgttatagttttggggctgacgtagattagccctaaataccactccattttcgcaatgttttaagctgttcttttggcactccaaagttaaaccgaaattcacattccttcaagaataaaggaaagttttttcggtcgattccattatattttcggaggattctcttcgcctgactccagaaattttctattccatttatgtggttttgtttcaccgcaaatagttcggaatgattgattcgttcgtggtgaaatttgctcgcatcaagggcatcatagcttcgataagtatcggtataaacccagctgtcaggcttgattttcctcacaataacaggcattaatgtccctgttttggtattttctaccactactgtaaatatttttccttgtcgctttaacaaaccgaatacggcaacttttcctgctgcacctcgacctcgttttcctttatgatgaccgccaaaatagctttcattaagctcaatttgatcatcaacaacctcatcggcttcaagagctaaatgatagctaatggcttcacgaatttttctataaaaaaatcgctgaattggcttggataccgagtaaatcagccgctgctcgggctgtaacttctaatacaaaaaattcaaggagcttattttgtatagatttctttaatttacaatgagttacattcatttttatagactagtgcacttgctaatctacgtcagcccctttttctatcatcgccaatccagcaagatagagatcgctaaaagcccagattcgtgatattaagcagacagggccaaattatggctatcaccgagtgagcacaaattagtggggagaaccataagctctacaaggcttgattcaagaaataggtttacaagttcgcacgaagaaacagcgaaaatacaactcatataaaggcgaacaagataaaattgtaccgaacctgttacaagaggtcgaaaagttgccgaaaaacgcgaatttgatattaccttcagactaatgaatgagctgcaccccaaaatctggacacctaatttgaggtgcagattatgtcctacccttatcaatttcgtttgaaaattatcaaactcgtcaccgaacaggattatggtatccgtgaggtggctaaacttcataaaatttcccacgctctcatcatttattggctaaaagcattttgggaaagagggcttgatggcgtaaaatcgcctcatacaaaccttcaaaccccgaaaatagtgaagccaaagatgaaaaagaaagatattgaaattccagaaaccacagacttttcacctaacgcgtttaaaaagttacaacgagagctcgccttggctcgagcggagattgcttacctaaaggagttggaggcgctcgaccgtcaaaaacaacgacagaaaaaagaaaaattattgaaagattgaagccagaccacgcattaaatgatttacttcgtgtggctaaaatgcctcgttcaagcttttactataaagagattaagcgaacttatcacgaggtaaaagagactatcttatcgttgtataaaaagaacagaaaacgagatggttatcgccctatgacgtttaaattacgccaaatggggtttaatttgaatcataaaacggtgttaaagctgatgaatgagttaggtattcattccattttacgcaagaaaagacatggaaaacgtggaaaaacatcgcatattgccccgaatttgctgaatcgtgattttacagtgacggcactcaatcaaaaatgggtaacggatgtaacggaattttaggtagggcaagaaaagctttatttttcaccgttgatggacttggctaaccgagaaattattgcctataacttttcaacacgccccaaattttcttcattggtaaaaagatgttagaacaagggcttagtcggcttaaaccgacagaatgcccgattattcatagcgaccaaggtgtatagtatggctcggcggaatgggtaaagatgttggagggtaaagcggtgcaaagtatgagtcgacgaggaaattgttacgataatgcggtgattgaaagcttttttgcaatattaaaatcagagtgtttttactctcggacttatcattcaattgctgaattacaagctgaaattgaagaatatttagtgtattacaaccaaaaacgaattaaacttggtttaaaaggattgagcccagtgcaataccgagctcaatatttaagttaactaacctgtccaacttttagggggcagatcaataatcactcgattataaaaactaccattaatcatggttttattcagatgatatttgcggtaagcctcaaaaacgaatggatcgggcttagtagggttttgccaaaatgaggataagtcaccttggtgtgtaagcccttcaaaatgataattggctcgtccaagtgtgatgacaggcataccatgtaataaggcagaaataccactcgtgctattcagcgttaccatgcctttaccgcgacgaagcagaacgggcaatggcacatcatgcacatagaatagtcgcccttttaagtgcggataacggttttcaaattcttgaataacaggatcataatgaataaaaccccgatccattgggtgatgcttaatgactagattgagattgtttggtgctgattcagcaaaagattgcaatacttcacgcaagaatgcgccgacactgttgaaatcacaatgtactttcacttggctgtcatcataaacttgcaatggcacaacaaagaaatcacctaatttcccacggttgacttttcttgcaaaggtacgatcacgcaagtaataacaagcacgcttgatgcctgatgtaacccatagttttatatagtatttcagattcagaatgcggtggtgttggtatttcgggtaattatctcgcccaaagtaagctttagtgtaataagcgattgccacttttgccatcggtaaaaaacctttggctaatttaagtggtatagctggctcaggtaaattttcggcttgctcaagatagaaatctgcttggcgaggaagaggggagaacgcattgaccccttgtttttcgagtgtcacgtaatcaggacggaaatagccttcttcaaacacccaaaatggaatctgttcatcttgtgatattttttttgcgattttgtggtatctacggttgtcaccaaagcaaaccatcgcatcaatattgtgttgtttgcaaaatagttgcaggtaagggtagaactcactcactgagccacgataagcagtcgtgttttcaatcgatgacggataaaaatgttcatcgccaccgttaaaattgattttataaacggtttttccttgtcccactaaccaagcagaaagatcggtaaaaaaatggccgataggcccctgcaaaagcaagatccgctgggcagtttgggctaattcatctaaataatgtttcattctaaaaccgttattcattatgtaatcaaagaatattttaccctgattttttaagtacgcaatgcgcgcactaaatgctgcaatttgccatattgtttagctagccaatggcgatgaatgtcactgtgattaagcgctaaacgctgtgcttttaaaatttcaatcgctgtttgagcattgcttagctcacccgtattcggattaacatattgtggataatagaccaatgtgccagcaataagttctaacaatgaaagttttctactgcgacgattaaaagagcagtgatcaacggttaatccccagtggctataaaacggcacaccatagcaatgcacagttttgtttcttagcaaggcttcaaagccggcaagagatgtcatggtgtgtagttcatccacggcattgatgcagtcaagcacgttttctgtttttgcaatttgatccgctaatttgaccgcttgcgattctgcaatatgaccaatgcggttaccacttacaacatccgggtgtggcttataaacgatataagcttctgggtttgttgcgcgtaccgtttttaataaatctaaattagtgcgaatattcggggagccagttcgaatagacgcatcgtcttcgacctgtcccaccactaaaattttctttttgtctgtatttggtaaagaaaatgtaccttcaccgacattatatttaccgatatgttgcgatactaacgcatgttgtagctgcttggcttcgattaaatccgcttcggtaaattgttgatgctgcaaaatctcttctaagcgagaagggctttctgcattgaaataaatacctaaatcgtcacagactaaagaaaggggtgcaaccaagtttgagccaagcccaactgaacgaataaacccatcttccattatgagtacgttaatattatgcgctttagcataatttagcacagcttctttacccgttccccatagtaacaagcggtcattttttgtgaatattttaccattgagtttgctcacatctttaacaaaatatagcttgcagcttggtaaacggaaaaacggtttaataaccgcacgtttccacaacgacattccaacgcaatagagattgccttgtaatcgtaagttaagtgctttggtgtgaatgatatggttaatgacatcaaaaatcgttcccgattggccggtattcggattcaaatagcgagtatattgaaaatatgccgcataaaacagttgtaaaactgaccgcactttacggcgctcactttgcgttagcgctttagcattctgatgacgatcatccgtcacaccccagccagcaaaccatggtacgccaaaagtcaccaccggtttacccactaataatgcttcaaaccccatttgagaggtaacacaataaactttctctacggctttaatcagcgaaatcggattgacgggatcactaaaaaaatgcacgttgcttggataattttcatttggcgaaaaataaccctgttttttaccacttaatacatcaggatgggttttcactaaaattttggcattgggattttctgtaatggcagcttgtaacatttgtgcaaaatgctcagcatcggcttgaccatatttcaccgccatatcgccaaaggtttgatcgatgacaagcactaacggctcgtcaccttctttctcataatccaccaatgtttggttatattttgaaagttgatgcgccacaatttgtgaccgagccttttccgctaaaacctcatcacattctcccgctagaacaagctgttccaatgttgagggacgagtcgtgtcgtaataaatacctaatttatccacaaccatagaaagtggtggataaccatcaactcccagaccaagagaacgtaaaaaaccgtcttctaaggcgataaacggtaagttatacttttgtgcatatgcacgtgattttttcgtggaaggacgtaccccccaacccaatacagaatcagccttcgacacagaaaaaatgcgtgcgaaaaccaattcttcattaggaaaaaatgaggctaaatgcggaatttttttgattccgtgcgagaaaatcagtgcagttggcatggtgattttattctagttatcctgggtaaaagtgcggtcatgtttttcagcatttttgaaaaaatcatgaaaatatgactgcttaagtaaaagtttagattggcttttataaaaaagctgcatttctaataatagttttgtaaaaagaatgtgttcttaagtgtaataaattagatttatatgtcagtttttgtattggacagcaagcaattagtttattaaataactctctatcccaatcatttctaaagttttttaacacatcatgtgcataaggttgatagttatttctataatttttatgaaagtcttcattagcttgtttatctaactgtgttaagatttcaaaaaaggtatggtattgataatattcaaatagactgtttcttttttcagcaaaaatcaacatagttgcatacattaaagccagtattctatttccagtttggtttgttgataaaaaccaattagaaattcggtatggattttcaggaattcttagtacatatagattattatcatttttttctaatatttctaaattctctttataaaattgattcgttgtgaatacagttgaatctatccaagtaccaccatatctcaataataattctgtacgaatataatctgagaaaaaggctcttttagattctctgaaactttctattctagccggtatatctatataagcctctatagtttctccagtaagaaataccagtttattaccatatattattttcattctgtctatcatagattttactatgagcggcgcgttatcatatccttgatcccaaaagacaaaaactggcgattctttaaagttgatatgagaagaaggataggaatcggcaattctctgtatgtctgataagttttctagaataaactttaattcatctcttctatagcttagacctggattattactatcaaaaaatagattccaatttatatttggatttttattttcatctatggataatgcaagattatagtattttaattcattttctttatcttttaatcttctataaagctgagccttctcatataaatattctatgcagttgtggtacaatccttttttatcgaaaaaatttactatatctttaattgtgtcccattttaaatttctagcaaaaaaatgtattgcgtcagaagctaaaacagaatcttgctcgttaagttcatttttaatattgttaaagtaagctaatgtacccgatacattttcttttgacataactaaatataacttaaatttttttcttattgcactatcattaatatttttaatgattgagttcacgaatgtgtagtgtccatttctaaagagataagatacatcattacatttttcaatatagttttctttgaaatcagataataaagaaaaagtatcattatcttcattgtgatagaatagattatttaagtaaatgaaatcaaagttattctctgatataaaaatattttttattaataattcgccagcatctttttctattcccacataaattctaaaccatgcattagaacaatttttaggaactttgacggtcaaagatttatgccaaactcccacttcattaggaatagatgagctagattgatagtcaaagttatcttttccattaattgtacaatcaaaagcaattttaggaacatcaaaaggtaatgttttagatatttttttattaagaataaaatcacaggaaatagtataagtcttcccaggttttaaatattttttattttttaataaagtaaagttaagagaattatcattttttttaccttttataataatctcgtttttatttattatggataagctcgttttttcattattaattttaccaaaattatttagaaaatcttttttagatgaaaagttaattgctatatttttaatattcatttaattgtcctgattattaatcatggttaagtgtttttctaacaatcctacttagaagtctgcctaaggaatggctctcattaaataaatgcttaagactatttaatataggttttttagaatcattgaaaaaagcataaggatttctagctagcttacgtttcttctgctctttatttgacttatcaatattattatctaacttaccaatagcttgtttattgttattggttacagtagtatttacttctagtaccttacttttctctttattttttaccttaggttcttcaatattattggttttatcatcattaaatgatttttttacccagtctttatgagccgtaatatatccgtgctctgttaataaacgcggaaccccgccttttaaccaatcaacggcaataacatcgatttcatttaattcttttaagaaaatatcttttcgtttggtcgtttcagcaaaactcacatctaaatagaagctgttttgttttaatgaaagtactctaaatggaacctgtgtgctccaaacatattgttctaatgggtttactgcataagctttacgcattggtgtgctgttatatgccggtaaattatagtttttctgaattttattataataatcaattacttttacatcactttttgagagtgagataggaattgattgagtcagtttatccagctcttgtttagaggtgatactttcaagctgtttcagcgttaatgctggtgcataaggtttttctacaccaaaacttgaaatgttatcttttaattcactgaatacattgcaaataaattgatcatttggtgtatttaactgatattgatagttaaattgcgataatgctgcatcaaagtaatcttcgtcttgcgtattgagtgctaagtaatcttctgtaaattttaataacccttccgaaatgagatcgcttacgcttctatctcggtgattaataattggttcaattctgcctttttcttcgtagtaatcaggaatactgtcgtatggggtttgtgcaaaaataggctcgaagaatgagaagttttgtggtgctaagatgaagttatggcgaacagatgtacccatatcatcagtaaaacttctgacataatagaatgggttttttacttctttaccaaaggcatcatttagcagacgaccaaaggtatcttgtgtatagcctcgcccccagaattcaacaaacgcaaatttttcttttggattaatttcttgttgaatgtattggcgtaccattttgcgtttttcagcggcgatcgctaacactttctcatggtaagcgggtgaatttttgaaaattttacgaatgttttcagctatttcaccacgaaggtgtttggcatgacgtaaactttcaaattcagggaagagagataagagttcactttcgcttaaataactggctttcaccaaatcttcaaagctatccataccgacaaagttaccaaattgccagaaggtttcatcatcaactttggtaatgaaagaaggtaaacgccatgctttacgtgaaccgtagatatattttgtttttacgttatagccacgaatttcaataattttgtcagcaatttgctttaagaaatgcccatcgcgagagataaagtaaatggtttcatagccgcgtttaattgcatctttaattgcccagttgatataaggaacaaaagaggcgcctacataagcatagttgtaatatttggtttcaaatagggtattaccgaaaccattttcttgaacaagctgtgtgcggtaacgatgcatcttagttgcaagctggtaagctggatagcggttatagttatccattgcattaaccattgcattttcaaatgggataaaatcatcaatatcatgcactgcagtttgaataccaagacggcgaggaacagaaccatcagcgtgtttgttatcgccatagtgtgtccaacggctatattggtaatctaagtcgaaaaagatgtgttggtataatttcccagttgatttttggtagccaatcgtacttgaaagataaagtggaatttcacgtaaacgagtatccgcacgatctaacattttataaattacgtcttcaggcaagtacatatcgctagccatggctacatcatgtcctttcgcttttaacgagaagagatagttaattcgtttttgaattggctcaacatgagcaatttcagcttcaatttcagcttgttttaagaaatcagtttgttcatcggtaagtaatagatttttttgcaagcgagtgtagatatcgtctaatgtaatctcaattttatctgattgacgctcaaacgttgttttacgcatgatatctcgcacatcgtgttcagcacggttacgtacattgatccaattttcagtcaatgcaagcgggaatttgatacctgatgctttagctttatcgcgtacatagtcaaaaatactaaatggacgtaatgtcgagcggcgaattaaggtatcaaaaatatcaaatgtatggagttcttttaacgattttggttgtaattggcaattatcaacatctgcaattaaagattccattgatttattttctttcttaaatccaaagaaataatccataagatattgttttctttttgttgaaatgattttaatgttggcattatctaaacaatttaataattgttggaatgatttaacgatgcgaccttctgttaaatcggcataatcgccaattagctcaagatcattctggtattcatctaagtcaggtacataacgaatgaatttttcaacgccagcatctaataaatcataaaagatacttgaatagtcaataatcgcgagatcgatagaattgaatgcctcataaatatcatagtcatcattccaaaataggatgtattcactatctttatatttttcactcatttcagcgaagtaattatctttcttcatgaacgggtgaactttaacgatgaatagttgatttttatgacggcaaacttcttcaagtttagcaaaatctggtaataggctatttaaaacaccttggattgcaccaatacgataagttgggcagaaaagaatagtttggctatattggcttttattttttggtaaaagcgtattgatatcataggtatggatcccattaggaccataaactgcattgcgagggtatttcccgcggataattagttctttactgatcgccatatcttcaaggaagtgatcttccattgcttgcgatgttgtaagaaacaatacattatttttgtagatatcatagtttcgaacatattttcgaacaatgctttcagctaatactgaattcatgcctaatgctaattcaatatgttttaaaccaacgccatgccatgtgttgaaaactttgatattttcattcatgtaaactggataactttcacggaagttttctgttacgtaaacgtcggcatgagggaaaagttctttagctttttcactatcggtaaacgtaatgttttttaagccagtagatttttttatactcttcatgctttcttcgttgtctgcaacccaccagcattcgtgggtttctttacaatttacaagcatatacaggaataaagccttaggatttccttgccaagcataagagccaaataaccaagttttcataataaaatgtacctttataattgatttaattttgctagaagttgttcaattcgttgattaagtggaatattcaaataattttgttctatcatataattgcgaagttgataaaaatcgtcttttgatatatggtgaaaataaagcttctcaccaaaagtgagagtatttgttttatagtattggctgttttttaaactaattaaatattctttttgtgcttttgaacaaaataaataatagaaaatattttcatttaataattgactttctatagctgaaatatcacaaagcccaataattgcataaaatttgcttaaatcggaagttaatgtacccccatttcgtcgtagtttccaagcttgtgagaatgtaagccctacatgaggtttatataatgtcacctttaatcctttatgtaaaagtgtttttacaatatccattaaaaattgatgataattttgcagacgatgtcctgtattcggatgtggtcgaataacgatttcattgatttgatagtgtttacttaataggagcaaggtgtttgttacttgccctacataagacaagcttgaatagttttcttgttctatgccaccttcccatgttggcacatagaagatggcgggaatgcctttacctgtgtggtctagaccggtttttccgataaaagtatcgcccataggaataattcttccagcctcaacatcatattgagagaagattttatgagcaatcaagcgatctatgccggcattacctgcggtaataacatgatcataaatacgtacaatcggtttaactgaagtaattttattactttccccatgagtaataaaaatatgagtaaggttacggtttgctactgcacgacaattagattgtgcattaaatgggtagaaaattacaccttctttcaatgcatcaagatatgcagcattcacaaaatgatagttgagagaagctttatttaaagctcgctcaatgattttagcggacttatgtttatacttttttactaaaatgatcgtgttttcacgaggaaacacgccatgttcaaaaaaagtaattgtttgctttaccgcaccaataatcttggtgtccaaataaataaaatagggggggatagccataacagacttactcaagtttatttatagagatcagctaaaatattggtaatatattcttcatcttttaatacaacatcaatgatgttacccgtctcgcggctagcaagtacgacaagagaggcaaaagctactgttttagcatcaagtaatgtaccttcaggttcaataccgaatgccttggttctcattggtgtttttgttctctctggattaacgcagttaattttaatattatccggtaaccattcttcagagatggcttgagttaagtttaccacagctgcttttgcagaagagtaaatagcatagaatggacggcctcgtgtatacgagcttgatgtgaaacctaaaaaactaccatgagtttgttttaagtaaggataagccgttatcacagcattaatcatgcccgtgtagtttacattgatactagttaaaatttcttcataagacattgatactaacgttttatgatttaacaccgcagcagtatttacgatatggtctattttgtgttcttttgcgtaaatttctgcgaatgctttttcaatagacttaacatcaccaacatcgacaccatttgaacgactaaggctatatgttttaattccaaatttttttgcaatatcgataatatgcgcgccaataccatagcttccaccaataacaactaatacctgatctttcatatcatataggcgatcaatagaggtgatattacgtagtgaaaaatgactacggctttggaataatttatcagcgataaaaagatcaactgggcgagttaatttaatgttggtttcagaacctgaaacgataccaactctttcttcaggtagggtttttaacacaatagaacaatcacaagtaccttcgatgccaccttgtgtataaatatcgtaagcttttttagcgtgcctagtttaaatgcttgtggagtttggccttggtagtattcagcacgcttaggaattttaataatttcttgggtatcattattaacatgaacaatggtatcaactgcaggaatagccacatctacagcattgtacttatctaatttcgcaatacattcagagattatctcagtcgctagtaaaggtcgtacagcatcatgaatgattaatttcgtattttctggttcatcttgaagagctgtgattgcagaaagagtagaatcagagcgttctttaccaccaaaaataatacgattaactttggaaaatccagcttttgatacgatatcttcaatacgacgataagaggtacgctcagaaacgatgataatttcatcaatttctttatgttcttggaaaatggcaagagtatgctccagcgcagttttgcctgcaatttttgagaattgttttgggtagcccaatcccatacgagagccaacaccaccagctagaatgattcctatgtttttatttttattcatattaattctccagagattaattggaaatacgtttaggtaagagtagaaacaatgttaaacacccaactattttggttttttataggcaaaaatgtagccaaacatacacgttttttcaagggaaattcaaaaatctactttatttttaacatttaatgaataaccctgctatccattcttgcaattatatcatttttcttatagatgggtgttaaaatgttaaccttgattatttagaaatattatattgcataatttttcgaagtatataatttgtataaagacagtcacagtgaataatatttttcccctttagaataaatgctatactcttccgactgtgtttacgaatagaggtgtggtggattgcaagccgatttgcaaatttaagcacttgtattccttacttgtgagatgataaatcaatgagaaattatccattaaaagcggtctgtgcggtgttaatgttggggctgtcagcttgttcttcgttacccacttcagggccaagccattcggctgtattagagataaaccaaggtgctgatgcttctgaattagcagcaaaagttaatgtaattgaattaaatgagtcgttagtgcagcaaatatatgcagctcaacaaagccagcgtttttcaggttttgcagatgtacgtggcaatggtggttatgccggtgctgtaaatgtgggggatgtattagagatttccatttgggaagcgcctcctgcagtattatttggtacaacctttagtagtgaaggacagggcagtggtcatgttacgcaattaccttcacaaatcgtgaataaaaatggtacggtgactgtaccatttgtaggaaatatcagtgttgcaggtaagacaccagaggctattcaagctcaaattgtagcaagccttagccgtaaagcgaatcagccacaagccgtagttaaaattgctaacaataattcatcagatgtcactgttattcgtcaaggtagtgctgtgcgtatgccattaactgcaaatgatgaacgtgttttagatgcggtggcagctataggtggttcaacaggaaatattgaagacgtgacagttcagcttactcgaggaaatcaagtgaaaacattggcatttgaaaccttaattgccgatcctaagcaaaatattgtattacgtgcaggggatgtggtttcacttttaaatacgccatataaattcacagggctaggtgctgtaggtaataaccaacagttacgtttttctagcagtggtattacgcttgctgaagcgattggtaaaatgggtggtttgattgatacgcgttctgacccacgaggtgtctttgtattccgttatatgccgtttgcacaactagactctaaagcacagcaagaatgggcggctaaggggtatggtaatggcatggaagtgccaacagtatatcatgcgaatttattacaaccggaaaccatgtttttattacaacgtttccctatccaagataaagatattgtatatgtgtcgaatgcacctctttcagaattccaaaaattcttgagaataattttctcgattacctcgccggtaacgagtacgaccaatacgatcagaagttattaatttaaggggataacatgacaaccgaaaatccggcaataccgacgaaaaagaagaaatcattctggaagaaaatgaaaccgctttttggattaactgtattgattccaacagccttttctgcggtatactttggactgtttgcgtctgatatttatgtttcagaatctagttttgtagtacgttctcctcgtagtcagtcttctttaagcggagttggtgcattgttgcaaagtacgggtttttctcgttcacaggatgatacttactctgtgcaagagtatatgcgttcacgtacagcactatccgcattagagcaaggtttgcctcttcgcactttttattctgaaaaaggcgatttattaagccgctttaatgggtttggtttgaatgatacacaagaggcattctatcgttattttaaagagcgtttgagtgttgatgtggattctatttctggcattgcaacattgcgagtgcatgcttttgatgctgaagaaggttatcaaatcaatgagcgcttattgaaagaaggtgaatcattaatcaatagattaaatgagcgtgcaagaaaagatacgattgaatttgctgaacaggccgtaaaagatgcagagaaaaatgtgaatgaaactgcacaagcattgagtcaatatcgtattaaaaacaaaatttttgatttgccagcacaatctggagtacaactttcgttaatttcaagtttgaaaagtgaattgattcgtgttgaaacgcaattagcacaattagtttcgattacaccagataacccacaggtgccagcgttgcaaatgcgccaaaaaagcttgaaaaaagagattgatgaacaaacacgtcaattatcaggtaacggcaactcagcagcgacacaaactgcggattatcaacgtttaatgttagcgaatgagttagcgcaacaacaacttgcagctgcaatgacttctttgcaaaatacgcgaggagaagctgatcgccaacaactttatttggaagtcattagccaaccaagcaagccagactgggcattagagccaagtcgtatctataatattattgcaacctttattattggcttaatgttatatggtgtattgaacttactcatcgcgagcataagagagcataaaaactaatgcaatatggtgataaaacaacatttaaacagtcattagctattcaaggacgggtgattaacgcgttgcttatgcgtgaaataatcactcgttatgggcgtcaaaatattggctttttttggctatttgttgagcctttgctcatgactttttttattgtaatgatgtggaaatttatccgtgctgataaattttctactttaaatatgattgcctttgtgatgacggggtatccaatggcaatgatgtggcgaaatgcttcaaaccgtgcgattggttccatttctgcaaacttgagtttactttatcaccgaaatgttcgagtgctagataccatttttactcgcgtgttgcttgaggttgctggtgcttctattgctcaaattctttttatggcaatcttagtcatgattgattggattgatgcaccgcatgatgtgttttatatgctcattgcatggttcctcatggcaatgtttgcttttggcttggggttaatcatttgtgcgattgctcagcaatttgatgtgtttggtaaaatttggggaacactcagtttcgttttattaccaatttctggcgcattcttcttcgtccataaccttccagcacaggcacaatctattgcactttggtttccgatgattcatggtacagaaatgttccgccatggctattttggcgatacagtggttacttacgaaagtataggctttttggttgtgagtgatctagccttgttgttactgggcttagtgatggttaaaaactttagtaaaggagttgagccacaatgattcgcgtaaataatgtatgtaagaagtatcacacaaatagcggttggaaaaccgtgttaaaaaatatcaattttgagctacaaaaaggcgaaaaaatcgggatttcaatttgaccatcaaaaacctcatcggcttcaagagctaaatgatagctaatgacttcacgaatttttcggtaaaataaaatcgctgaattggcttagataccgagtaaatcagccgctgctcgggttgtaacttctaatacaaaaaatgcaaggagcttattttgtatagatttctttaatttacaatgagttatcttcatttttatagactagcatacttgctaatctacgtcagcccctttattttttcagaaaatgtagaaagtttatttctttttaaaaagccgttggcaatcttagtaaattttaatacactagaaagcctagtcggggtgcaatacgctgagatcatacccgtgaacctgaaacagttaatactgacgtaggaaactaggaatacaaccttatctccttttcgtcattattgctgccttttaatcataaataaggatgtaataatgaaacttcttaaattaaccttaatttctaccgcacttttttccactgcggcactagctcaagcacagcaaagtgtaaacgtgtatagctacgactctttcacttctgaatggggggctgggccaaaagtaaaacaagattttgaaaaagcccatccacaatgtgcgattaattttacgccttttgaaagcgttggtgtgttgctcaaccgtgttcgtttggaaggaaagaaaacaaaagcggatattgtgctaggtttagataacttttttttggaacaagctgaaaaaacaggtatttttgcgccaaataacgtggatttaactcagctggatttaccaacaaaatgggcgaataaaaccttcttaccttttgatttcggtaattatgcttttgtgtacgataaaactaaattacaaaacccgccgaaaagtttgaaagaattagttgaacgtcaagatcttagtgtgatttatcaagatcctcgcaccagcagtgtgggtcgtggtttattggtttggatgaatgccgtttaccctgctgataaaattcaatccgcttggaaaaatttagataagcatacagtgacagtgggtaaaggctggtcagatacttacggtgcatttttgaaaggcgaagcggatttagtattaagttacagcacatcgccactttatcatcaactttttgagaaaaaagataattatgcggcgacagattttgcggaagggcatattactcaagtagaattagcggcaagagttgccaaccatcccaatcaatgtgcggatgattttatggcatttttaatttcgcctacagcacaaaaacatattgtgacagccaatattatgttgccagttattcaaggcgaaattgaaccgcactttgatgcgcttaaagttcaacaaaaaatgcaaacaccaattaatccaacagtgaatcctgagcagttaaaaaattggatcagcacttggcaaactacattaacaaaataatttgatgctgtcgttatttcatcatccacaattccgcctgcgtcattatgtgggcggcgttgttgtcatcggcgtgattacgcttttttatggaagtgcgttaagttcaatctttacattgggcgatgaattacaatggcgagcttggtttactgatgattatctacagcatctgattcttttcagttttgggcaagctttactttctaccgttttatctattttctttggtttacttctcgctcgggcattattttataagccattttttggaaaaaagtggttgttaaaattaatgtcgctaacttttgtcttacctgctttagtggtaatttttggtttgatcggcatttatggttcaagtggttggttagcttggcttgctaacctttttggaatgtcgtggcaaggacatatttacggactttcgggaattttaattgcccacctttttttcaatatcccactggcagcacagcttttcttacaaagtttgcaaagtatcccttatcagcaacgtcagcttgcagcccagcttaatttgcaaggttggcaatttgttaaattggtggagtggccggtttttcgtcagcaatgtttgcctacattcagcttaatttttatgctgtgctttaccagttttactgttgttcttacattaggtggtgggcctcaatatacaacattagaaacagcaatctaccaagcgattttatttgaatttgatctgccgaaagcggcactttttgctatgttgcaatttgtattttgcttgattttatttagtttgacatcgcgtttttcgctttctaatcaaaatggcttgagcaatagtaatatttggtttgagaaacctaaaagtgcggtcaaaattttccatattttggttttacttgtttttgtctttttccttttttcgccagtattgaatattcttattagtgcattgagttcatcaaatttactcacagtttggcataattcccagctctggcgtgccttaggctattcactttctatcgcgcccttgtccgcattacttgcattaacgatggcaattgccttattgcttttatcacgccgtttagaatggttgaattatcaaaaaatctcgcaatttattattaatgctggaatggtaattttagccatcccgattttagtgcttgcgatggggttgtttttattattacaagatcgtgatttttccaatattgatttgtttatcatcgttgtattttgtaatgccttaagtgcaatgccttttgttttacgtattttaagcgcaccttttcataacaatatgcgttattacgaaaatctgtgtaatagtctgggaattgtgggttggcaacgtttttatctgattgaatggaaaaccttgcgcgcaccgctgcgttatgcttttgctttaggtttagcgttatctctcggcgattttacggcgattgcgttatttggcaatcaagagtttacttctctaccgcatttgttatatcagcagctagggaattatcgtaatcaagatgcagctgtaactgcagggattttattattgctttgtggcatattgtttgcctttattcacacatatagggatgccgatgatttatctaaataatgtgattttgaatgataaaaccttaccgatgtgctttaatttgagcgtaaatgctggcgaacgtgttgcaattattggcgaaagtggcgcggggaaaagtactttattgaatttaattgctgggtttgaatttcctgctcaaggagaaatttggttaaacgataaaaatcatacgcgtagtgcgccttacgagcgtcctgtttctatgctatttcaagaaaataacctatttccccatttgactgtacaacaaaatcttgccttaggaataaaaccctctttaaaattaaccgcacttgagcaggaaaaaattgaacaggtcgcttgctccgtaggattgggcgattatttagagcgtttaccgaattatctttcgggggggcaaaaacaacgagtggcattggcgcgttgtttgttgcgagataagccaattttgttattagatgagcctttttctgcattagatcagaaacttcgggtagaaatgctggctttaatcgctaaactttgtgacgagaaagatttaacattgctacttgttacccaccaaccatcggaattaatcggttcgatagatcaggtgttagtggtggaaaatggtcagataagtcaattacaaaaaggggcgtaaaattagtttcattcataacgttgaattgattgtttctaccatatacactaattcatcaattaagaaagtataaaaagcgtggtgtttttaaccgcactttcaaaggaaaaacatgttagcggaaaaattacaaattaactctattacacctcatccaagtgtagaatattggtctgtttgcaaagttgaggcgttatttgaaacgccatttttggaattagtttaccgagcaacgcaagttcatcgtaagcattttaatcctcgcgtgattcagttatccacgttaatgtctatcaaaacggggggatgcccagaagattgtagttattgccctcaatcagcccgttatcatactggcgtacaaaatcagcagttattagatgttgatgagatcgtcgctaaagcaaaaattgcgaaagcgcgtggtgcggggcgtttctgtatgggggctgcttggcgaggccctaagccaaaagatattgagaaagtcacagaaattattaaagccgtgaaatcacttggtttagaaacttgcggtacctttggtttattgcaagacggtatggcggaagatttaaaagaagctggattagattattacaatcataatcttgataccgcaccagaacattatgcagaagtgattggtactcgccgttttgatgatcgtcttagcaccttaggaaaagtgcgcaaagctggattaaaagtgtgttgtggtggcattgtggggatgaatgaaacccgtaaagaacgggctggattaatcgcgagccttgcaaatcttgatccgcaacctgagtcagtgccgattaatcaactcgttaaggttgaaggtacgccgttagctgatgcggaagaattagattggacggagtttgtgcgaacgattgctgttgcacgtattactatgccaaaaagttatgttcgtctttctgcaggtcgcagtggtatgactgaagaaatgcaagcgatgtgttttatggcgggtgcaaattctattttctatggcgataaattacttgttacagataatccagaagaagatggcgatcagttattgatggcaaaattagatttagagccagaaactgcagaaaataaaaagttgtagtttgcgttagaaagctgagaaattaagtataaatctattcctttctttatttcatatctcacaataattttcaatagccaataaaaaagctccttgaacattaaggagctagtttagtttaatcttaaagaatttctttcgcttttgctaccacgttttcaacagtgaaaccaaagagtttgaataattgatctgctggtgcggattcgccaaagctattcataccgacaacacgaccattgaatccaacgtatttataccagaagtcagcaatacccgcttcaatcgcaacacgtttggttaccgctgcaggcaatacgctttcacggtacgctgcatcttgtttatcgaaacggttagtacttggcatagagacgacacgtacttttttaccttcagcacttaatgcttcggctgcttgcactgctaattccacttcagaacctgtcgcaatgaaaattaactcaggtgtgccatcacagtcttttaacacataagcaccacgtttaaccgcatctaattgtgcagaagtgcggttcatttgagcaagattttgacgagtgaaaattaacgcacttgggccatcttgacgttcaaccgcttgttgccatgcgatggctgattcaacttggtcacatggacgccatgtttcaaggtttggaattaagcgtagtgaagccgtttgttctactggttggtgtgtaggcccatcttcgcctaaaccgatggaatcgtgggtataaacgaataatgtgcgttgtttcattaatgctgccatacgcaccgcattgtgagcatattcatagaacattaagaaggttgcgccgtaaggaatgaaaccgccgtgtaaagcaataccgttcataatggcagacataccaaattcacgcacaccatagttaatgtagttaccacctacgttttcgtgtgcacgaattggttttgaaccactccataaggttaagttggagcttgctaagtctgcagaacctcctaaaaattctggcaataggtgtgcataggcttcaatggcattttgtgatgctttacggcttgcaatactcgctggatttgcttgtaatttttcgatgaacgctttagattctgccgcccagtttgttggtaattcgccagaaacacgacgtttaaattctgctgctaattcaggataggcttttgcataagcggcaaatttttcttcccaagatttttctgctgcagcgcctttttcttttgcagaccattcagcatagtactcagccggaatttcaaatggagcatattcccagcctagtgctttacgggttaatgcgatttcttcatcacctaatggtgcgccatgggaatcatgagaacctgatttatttggtgaaccaaagccgatgatggttttacaaataattaacgttggtttttctttttctgcttgagcaagaatggtagcagcacgaatttgctctgcattgtgaccatctacattacggattacttgccagccataagcttcaaaacgctcggcggtgtcatcactgaaccagccatcaacatgaccatcaatggaaatattgttgtcatcgtagaatgcgattaatttacccagacctaaggttcctgctaaagagcaagcctcgtgagaaatcccttccattaaacaaccatcgcctaagaacacataagtgtggtgatcgacaatttcatggccttcacggttaaattgtccagctaaggttttctcagcaattgccatacccaccgcattagtgataccttgacctaacgggcccgttgtggtttcaacaccaggggcataaccatattctgggtgacctggggttttagaatgtaattgacggaattgttttaaatcttcgatagaaagatcatagccagttaaatgtaaaagactataaatcaacatagaaccgtgcccatttgaaagcacaaaacggtcacgatcagcccatttaggattggttggattgtgttttaaaaagtcgcgccataacacttctgcaatatccgccatccccattggtgcaccagggtgaccagatttcgctttttgtacagaatccattgctaagacacgaattgcattggctaattgtctacgagttgccattttgttctcctgtgataattcgttttgaaaaataatccagtgcattctaccttatttctgaaagaaatttagcaaaaatccgcactcaatttaatagtttgtgacaataatcaaattctacgatgacattgatgaaaacgcatactactagattttattgtcaaatttaccgcacttttttctctttgagtttatgataagaacagcgataatgacttaaaaaatacttgttttacaccaaataagataacgccaagtgcagttaggcttagcacaataatcgttgcaagcatggttgattttattagtttttctttaattatttgcactttttcaactcacatcggttaaaatctttttagtcgccacaatttacaggatttttatgcaaattcaatgtttcgaaagtattacacaaaaatacccacaatttcctaccgcacttttggctaatgaggaacctatacagaacggagagccttttatcttatacggcacaaagttggacataagcacgctagaaaaatttcaacaaaagtgcggtcaaaattttcagatttttgatgtttggatggtagcgaaaaatattatcgtcttattgaaaggtcaatggtttgctgacttcattaactttgctcatgatgttgaagtggatattgctaaattagatttcaaccctaaattgtctcaagcagggttgttggtgatggatatggattctaccgctattcaaattgagtgtattgatgaaattgcgaaactagcgggtgttggcgaacttgtttctgcgattacggaaagtgcaatgaggggggaattagatttcgagcaaagtttgcgttgtcgagtgggtacattaaaaggtgcaccagaaattatcttacagcaagttagagagaatttaccgctaatgtcaggattagttgaaacgatccaaaccttacaaaaatatggctggaaaactgcaattgcttcaggtggatttacttattttgcggattatttgaaagccttattgcaacttgattttgctgcatcaaatcaatttgatattgaagatggaaaactcactggcttagttaaaggcgatgtggttgatgcccaatataaagctaaaacattgcaacatttgttagagaaatacggtattgattcacaatattctattgctattggcgatggtgcaaatgacttggcaatgatgaatgtggcagggctaggtgttgcgttccacgctaaacctaaagtgcaacaacaagcgcaaattgtggtaaacttcgctgacttaaccgcacttttatgccttctaagtgccaatgatagaatttaataaaacgggagaagactatgccatcttttgatattgtttctgaaattactttacacgaagttcgtaatgcagtggaaaatgcaaaccgtgtgcttagcacgcgttatgattttcgtggtgtcgaagcggtaattgaattaaatgaaaaaaatgaaacgattaaaattactacagaatctgatttccaacttgaacaattaattgagattttaattggatcttgtattaaacgtagtatcgagcacagttctttagatattccagcagaaagcgaacaccacggtaaactttacagtaaagaaataaaacttaaacagggtattgaaacagagatggcgaagaaaattactaaattagtaaaagattctaaaatcaaagttcaaactcaaattcagggcgaacaagtgcgtgtgacaggtaagtcacgcgatgacttacaagcagtgattcaacttgtaaaaagtgctgaattaggtcagccattccaatttaataattttagagattagtttttcaaataagggcgaaatgttgccatagttttttgataaaacttgacgaacaccgctttcaagcgtaacattcgcccgattttttaacgagaaggacacacactttggacagtcatagtcgataccgaatatcgctctagacgcccgccttttattatcggcgtgcgttcgccggtaaatttaccgttgtttcggcatctcttaacgaaaactttgcgatttttcaccgcactttcgtttcttctttaatttgttcactgttagctgttcataatcctataaggagtatgaaatgatcaacgcgtttgctatcaatgattcccgcttggttcgcattgacgaagaccaaactgatctcaatactgccatttggcttgatttacttgagccgacaggcgaagaacgtgaaatgctacaagaaggtttaggtcagagcctagcatcttttctagaactggaagatatcgaggcttccgcccgtttctttgaagacgaagatggtttacaccttcactcatttttttattgcgaagatgaagacaattatgctgatttagcgagcgtcgcttttactattcgtgatggtcgtttatttacgttgcgtgatcgtgagctacccgcattccgtttataccgtatgcgttcacgtagccagcgtttgttagaatgcaattcctatgaagttttactggatttatttgaaacgaaaattgagcaattagcggacgtgattgaaaatatttatgcagatttggaagagttaagtcgcgttattttaaacggaaaacaagatgaagcctttgatgaagcattaaatacactcacggaacaagaagatacgagctcaaaagttcgtttgtgcttgatggatactcaacgtgcattaggttttttggttcgcaaaactcgcttaccaactaatcagttagaacaagcacgagaaatcttacgagatattgaatctttgcaaccgcataatgaatcattattccaaaaagtaaactttttaatgcaagctgcaatgggttacatcaatattgaacagaacaaaattatgaaattcttctcggttgtttctgtgatgttccttcctgcaacattagtcgcgtctacttatggtatgaactttgattttatgcctgaattacattttaaatatggctatccaatggcaattggattaatgatcgcagccgcactgacaccatatatttattttagaagaaaaggatggttatgatggaattatcccaaaccgcattatttatcggatcaattattaatctttacgcacttgtattaatcttacgagcttggttgcagtttgctcgtgtggattattacaaccctgtttcaacatttgcagtcaaaatgactgatccagtattaaaacctctgcgtaaagttatgccaacggtaaaaaatattgatacttccgcattactgcttgtatttattattggtatgttaaaaggtattatttattttggcttatcagtaaatgtactcttagtattgggcgtattaactgtattgaaaagcattggtttagctattttctatgtgctttttattggggctgttttaagttggtttaatcgaggtaataattctataagttatgccttttatcaactctccgaaccacttttaaaaccaatccgtcgattattacctacattaggaatgattgatttttctccgatggtcgttgtgtttatcttattgtttttaaacaattttatgcttgatcttctaggtgggctttggattatcgctggttaaatattcatattcgttatttgaatattgctttataaaaatattgaagatttagttggtaagaatagtattttctattcttacctttttatttcatttttagaggtttttgatttttataattcttataaaagatataaaattcttttataaaaataaagggaagtttatttacattgacatttaaatagcagaatttattgtcctattacctaaagtaccatcatcaatcgcttcttttggcgtcccaataacttcggcgattttctctccatttttaaaaaacacaaatccaccattttccatttttgtccaagattcatttttggttaaaggaaatgttgtgatgatattgaccttatctcctgcttttgcataatagctaaaatcaattactccatcatcatcaatacggtgagctttgccaaaaggtgcttttcgcataacataatgtaagtttgttgagcaatgtgcaatcatccactcgccattagaaagaatgaaattaaacgtaccgtgttgagcaagttcttttgttactttttgaattgcttcaaaaatttccatttcacttggttttttgcggaaagtatttttaagatattcagccatataacagaaagcagcttcagaatctgtagaacctattggctgtaaaaaatgatctgtcatatctggtaagttttttaaattaccattatgcgcaaaaacccagttttgtccccaaatttcacgaatgaacggatgggtgttttcaatattgacttcgccttgtgttgctttacgaatatgtgcaataacattaagagatttaatattatattgttttatacaatctgcgatgggggaaagactggctgcttgattatcacgaaaaatacgtacaccacgtccttcaaaaaacgcgattccaaagccatctgaatggcaatctgttaaacctgcgcgacgacggaaaccttcaaaagaaaaaacaatatccgttggcgtattacaattcattccgagtaattgacacataactttaattagatataacctcacaatatgtgagcgatttaacaccattatagggagaatatcaagagagatttaatgaatttttatgttgtatagatattaatgatagaaatcttatttaatctattattctttaaaaatcgagatttaacagtctctttcggctgatgtattgtggtacaagcaaataaactcacaaggaaaacaacaagcaatgccatctttaatttattcataaatacaaaattatgagaaataagaagtgcgtataatagaggaaattgggggctatgtaactaatccttaaagttatagagaatattcatacaatcttttgcatatttaaaataacgataaaaagagcttaattacaaggaaatatcacgaacaagcggagattgatggaatagaagtaatgtatgtgattgattgttgcgataaatccaaaaaccttgaaaattttggccgcactttttgtgttgaaaacttatactgacgcacattttctaactcgtgccttggaaattaaataaagtgcggtgagtttttgagatgttttagtggaattagtcacaagattgaaagtttacgtcatcaaaggcagaataggctaaatgccatttaggttagtaaaatacgataatattcagattaaatttgttattttcttcataaatggaaaatacatttgaatagaaaagaatttaagttctgattgaattttattttctacagctaatttttccattcgatcatttgttcaatcaataaaattaatttttttctttccgtatgatctaattgatttaataatcgatcaagttgataaatttgatccgatggttgcaaactactatctgtgatcaaatcggacacacggcattgaaacagtgttgcaaattcacataaacgctctacatttaatgcaatcctaccacgctccattctagaaatggcatcattgcttaatcccaatatttctgccacctttgcttgtgataaacctgaggccttccgatattttgcaatagaagcccccacttgtttatttatctcaactttatctttcacgccattttctttattttatttttgaatggaacgagtatagacattcactactcaataaaaagagaattaaaatctttcaataaagagtttaattcttacaataagcgagattttatacaaaatgttttttttgcccgaatcaaccgtgcagatacttcacataaaatacgtgcatatattgaaatcaagagaataattatgtcgaacaaacacgaaaaactagctgaacgtttagcttcaaactggagaaatgatgatgaagataaagttgatgagttaatgaaatattttgatatcagctctcaagaatcacacttattaaaattaaaatctgtgatggagaaatttaataatgcattagaaatgatatttcctaaacgtaaaaataaggaaatagaaataaatgaaaatgagtctttattttctaatatttggggggtgaatttatcatcattagaaagacgcaaacaaaacaatgaacaaataaaaaagttatttccttggttaaactagtatgtaataagaaacaagaaacccattgaactacccaatgggttttcgtttgaagtttacaaaaaaatcaatctatataacaataattctatattgattatatcggagcctattatgtcactgacagaacaattagaaaatttaaacgattactacaaagaaaatcgtgatacctttaacgataactttcgcttaaaaatgcaccgcacattaagctggttaaaaaaagccaatgaagaagagaacttagacttcaaatttatcgcactttggattgccttcaatgcagcctatgccgatgagttaagtaaagaagaaattgaacgtaaggtatttcatcaatttattattcgcctttgtgaattggattctgaacatctactttatggaattatttgggatgaatttcctggtacagtgaaagctctactagatacgccttatacattccaaccattttgggatgctcataatggtctattagcaggaaaagaatggaaagtaatgttttctgcagcgaagaaaaaagcccattttgcatttgaagagcaaaaaacagcagaagtattggaagtggtatttggtcatttatacacattgagaaatcagcttatacatggtggagctacttatgaaagtagtaccaaccgcaaacagatagaggaatcctgtgcattactgtcattattcgtacctgcaatggtaaaaattatgttgcgtaatgattctgagccaagttggggaaaacctttttatcctgttgtaaaataaatttagggactgtgctatataaccagaccaaatttcccttaactaattgttttaaaatggaaatttgagattttatttcactgttgttaaaatgccattcacattcttttaaatgcagttctctattctctttcggaatgccattaaacttgcgtcaatggcattttgcttgattccaaaaattctaaattccgtttacgtggttgtgattttcagtaaaatgcgagctgtgattaatgccgaaaatggctaaattcactaacatcaagcacatcataactacgaaaggtatccgtgtacacaatgctatcaggcttaactttctctcggataattggcaataatgtcgctgattgtgcattagggacaacgatttccttttagaagtctgaataccgcgactttttctcattggtttattctaacctaaatgggatttttagtcgttatctagtacagcctcaagatttttatttaagtgtaatggctgcgacaaaacaggtaattttacattctccgcacccattgcaacgttcattatcaatctctaaagtgctggagattgcttgttgtgggcaagcggtttggcagtctggacaggtttgattttgtaggattaaacaggctgaggaaaattgtggacgaagtaatgtatctgctggaaaattaggatgtagtgcatttgtcggacaaacttctgcgcatttaccacacaaatcacaaggtgcgtggtcaatttcaagggtggcttgttgctgttttagttgaattaaaccattagggcaagctgaagcgcattccccacaaccattgcagacggcggaaaataaatcttctcgtgctgaaaagggaggacgagactgcgttttttctattgttgattttgtagctggaaatacatgacgcaatagtcctctacgagaaatgtgatggtggcttaaataagcctgataataggcttcgtttttcattatcgataaaatcttactgtcggtacattaatatgtaaatctacttgccattgttgtaaagtttttatggtaagtaatgcaagagcttgataaaaatcagaattttctattttgcttagttgttcaaggaaatgatacgcccaagttaagaagtgttcacgtagaaatttggttaataagtgcggtcgattttctgctaaatatgcagcaagcattagcattaagccaatatgatcttctggttcatcttgttgtgtttgaaatgcgatttgatgttgttgtaagaaatcgcgtaatgctaagagagaattaccaaaaataacacattcaggatcaagatatacggatccccaaggtggcgtaggtaattcatttggaccaataaataaatactgatattgttcagtgatattttgttgcagccctttttcaataagtgcggtgatttttttatgtgtttttacatcaaatgaaatttcccattcttgcatccaatttggttggcgaaagaatgtcaaaatatcagtaagtcgtgcatcattaggctcatagtaaaatactgcaccgagtaaacgcccataaatagaaatttgttgaagagtattttgcatagtatctccgaaaacaatttgtcattagtgaatggggatatgaggggtggttaaatattactaattaacgtttctaaaaattgaggcgtatgctatacgcctcaacataatttaaccaccaatcgccataccgtaagtcatatgtaatccataaaataatacgcgaccgatgccttcagctactaacgttaatagaacggaaatacctaatagtcctatgtttttcactcggaataagaggaaagctacaatggaaagtaaacataagcgagttacggtcattatggcataatttggtacgaggtcagcggcattttgaatagcactgtgaatattgtgtaaattgaagccttgatatatggctactattgcgaccaatgataccccaatggcgaataaacttggcagatgctgaagctgatattcacgttgtttattagggattaataacgcatagctcaatgttaatccacctaatacaacggtaaggtagaatgaccaagaggttaatgcattattccaagttggtatgcttgtaatatggtaaacctgattcattacatacataaatagtatgccgataagggcggtcacaattcgccatacatttccaagtgaaactggcattttacctaaaattgcaatcagccagtagaaacctgctaatgtgaaaaatattgcaccagcggcaatttcattactcatcattgatgagccgactcgattaagtgaattaaatgcacgtataggtaagccaagatgcataatggaagcaataaatccaatacctagtaaagccaaaatcacaaacattactttatgaatataagtgcgactttttgtatttttctcatttaatagtacaaatgtgaaaacaagccaagcaccgaccgcactttgtgccaaaactgtaaaaaatactaatggcagttcatataatcctgtattcatcttacacctctcttgggtttcctaagaacccacttgtatcgccacttaaacgagcgtatttattgggttttaccactaaatttggttgagtgatatcagtcggtggtagtggtgcgatggaggcttgtgtgccatattttgttcgaagttcatcaataggagcgaaatccaatgctcgtagtgggcaggcatcaacacaaatcggtttttgacctgattttacgcgagaataacatccatcacattttgtcatatgacctttttgtgcatcatattgcggtgcatcataaggacacgccatatgacaataacgacaaccgatacaaatttcttcattgacgatcacgaaaccatctgcatttttgtgcattgcaccagttgggcaaacttttgtacaagcaggatctgcacaatgattacaagaaatagacatataataagcaaatatattttgatgccagcatccatctgcttgttgattccactgaccacctgtatattcataaatacgacgaaaattgacttctgtgccaagatctttgtaatccttacaggctaattcacaagttttacagcctgtgcaacgttcagaatcaaaataaaaaccatattgttccataattatccccctacaaacgttccacttgaactaaattagaatgttgcggattacctttcgcaagcggtgatgggcgttgtgtcgtaagtacattaatgcaacctgaatgatcgatacgatctttatctggtgcataccaagccccctcgcttaatgccacaacccctggaataatacggggtgtaatttttacattaatatgtacttcgcctcgatcattaaagatacgaatcatatcgccatttttaatattacgaggttttgcatcaataggattcatccaaacttcttgtggattagctgcttttaatacatccacattgccataagttgaatgggttctcgctttatagtgaaaaccacttagttgtaacggatatttttccattaatggatcaccgtaatgctcaaaactttgggcgtgaataggtaagggatgaattacgtcatcttctgctaatttccaagtttttgctatttcagctagacgagaagaataaatttcaattttgccagatggcgttttaagtggatgggcttctggattatcacggaaatctttgtatgcaactttaaagccattaggatcaacttttttaaaaataccttgttgtctaaattcttcaaaagtaggtaattcaggtaatttttctcgagattgctcataaatatggcgtaaccattcttcttgtgttcttccttcagtaaatttttcttttacgcccattttctcagctaaatcacttaacatatcgtaaataggtctacattcaaaagatggtttgatcacttgatctgcaaaaatgacatatgccatattggatacaaaggcatctaaagcgaaatccatttgttctgaagttgtacaatctggtaataaaatatcactgtatttggcagtagatgtcatatgattatcaatagtaatgatcatttcacattgcgtatcatcttgtaaaatatcgtgagtacgattgatttgtgcgtgttgattaatcaaacagttacttgcgtaattccaaattactttaattggggacgataatttatcaacaccacgaataccatctgtaagtgcggtcatttctgtgccacgaataattgcatctgtccataaaaacattggaatgcttgctttcataggattttttagcgttggcatccgcacaaatggaatgctatacgcactttcacgtgcaccagtgttaccgccgtgaattccaacattacctgttaagattggcaacatcgcaatggcacgagagattaattctccattactacgacgttgaggcccccaaccttgggaaataaaggcaggttttgtgctgccaatttcacgtgcgagtttaataattctctccgccggaatacccgtgattttagccgcccattctggagttttagcgataccatcattaccataacctaaaatataggctttataatgaccatttttaggggcatccgcaggtaatgttttttcatcataaccaacacaatatttatctaagaaaggttgatccacgagattttcttgaatcattacataagcaagggcagcaacaagggctgcatcagtccccggacgaattgggatccactcatcttcacgccctgcaccagtatcattataacgaggatcgataataatcattttggcattggaacgagctttggcttgttcaatacaataagttaaaccacctccactcatacgagtttctgcaggattattaccgaataacactattaatttggtgttttcaatgtcagccattccatttcccaatgcccaaccaccaccataggtataatctaaaccgactgcaatttgtgcggtgctgtaatcaccataatggtttaaatatccaccaatacaattcataaaacgagcgatcatagtggatgcaggtggccaagatttagccattgtgccaccgagtgttcccgtaccatagtttaaataaattgattcattgccatattttttgatattgcgtttcaatgcgtatgcaatttcagttaaagcctcatcccaactgattcgtttgaatttaccttctccgcgtttacctatacgtttcattggatattttaaacggtctgggttatacactcgacgacgcatagaacgtccacgtagacaagcacgaacctgatgatcaagattatatgtttctgtccccgtattatcggtttccacataagtgattcggttatcttttacgtgcattcgtaatggacaacggctaccacagtttactgtacaagcactccaaacaatacgttcttgattattttcattgaggcgttgtgtctctttagccattacattgaaaggtaaagtaagatttgaaactgccagtgcagctcccgcagatgacgccttgacaaaatctcggcgacttatttgattaaagttactcattatatcgttcccccacagtcagattgaaaaataactaaaacgagttaattataatctttgtatagaagttttacttgagccaaatcaattaatcattaataggtatattatttatagggtattttagtagattgatgttttaataaattttggaataacaaattgactatggatttaaaaacccgttagcatagtggcgtattagtttatctaatatgttaagtttaactattattaactagaggatctcttcatgaagaaacttatcgcagttgcggtgctttctgcatgtggctcgttagctcatgcaaacactaatattccaaactacaatacagacgcccatctttacgaattcacgcaaacctatgatttagttgtgccaaaaggctcgcaaggacaaaccaatttatgggttccattaccatttaatggggaataccaacaagtgaaattgattcactttgaaggtaattacatgaatgcctatgtaacagaaaacaataaatacggagcgaaaaccttatttgccacttgggataaagatgcacaaaaacgtgatttaaaagtcacgatggtcattgaaacaaaagaccgtgaaccgatggtgaaaggtgctttagagaattatactccgccaaaagatattcagtattccgtggatgtacaagaatacttaaaagctactccacatattaaaactgatggcattgtgaaagaatttgctgacaaaatcgtaggtaaagaaactaatccattgaaaaaagcagaacttattcaccgttggatcgtaaaaaatatggaacgtgataattctgtattaggttgtggcgacggcgatgtagaaaaaattcttaccactggcgtattaaaaggtaaatgtaccgatattaattctgtatttgtggcacttgctcgtgctgcaggcatccctgctcgtgaaatttttggtattcgcttaggtgcggcagagaaaatgggcaaatattccaaaggtgccttcggtagtgcaaatgaacaaggcatcgcaaacgtaagtggcggtcagcactgtcgcgctgaattctaccttgcaggatttggatgggtaccagttgattccgcagacgttgccaaaatgcgtttagcagagaaaaaatctgttgaagataaagatacacaagccgtagcaaaatatttgtttggtaactgggaagcaaactgggtaggatttaatcatgcccgtgacttcgatttatatccacaaccagaactggctccaatcaataacttcggctatccatatgcagaagtaggtggcgatccgttaaattcctttgacccaaaagaatttaaatatgactacgtatctaaaaaactctaataaatccttttgggttgccatagccgtcgcactaagtgctgcggtggcatcaaccttgtgctgcatcgcaccattaatttatttagtatttggtgtgtcgtccacttggttgattggcttaggcgaatatgattatttgcgcattcctatgcttatcatttcattatgtgcctttgcctatggattttggctgttgatgttttccaaaaaaatcatttgtagcaaatatatttcccgtaaaaaacttatcgttttatattggattgtatttatcgtgatgatttttttcttaacctatccaacaattttaccttggattttagaattagctaattaggaataaaaatgaagaaattatgtaccgcacttttgctttcgctgtttgcaatttctttcgctcatgcgaatgaaaccaaacaaattgtgctaaaagtaaaggaaatgaattgccagctttgtgcttacttagtcaataaagaactgcgtaatatcaatggcgttatttcaacaaaagcatctattaaagatggtttagtgacggttgtggaagatccaaaagtcacaaaccaacaattattcgatgcaattcacaagctgaaatatactgctgaagtcgtgaattaaacgctaaatatctagcaaaaaagtgcggtaaaaattcaccgcacttttctttagctattaaattagactaattttttaattagtttgattacagtacaattaattaaatatgataaacgcaatattattcagcactttcgcttaaaaatccgccactttgatgattccaaagtttagcgtacagaccattgagctctagtaattcggcgtgcgtaccttgttcgacaatttgtcctttatcaagcacaatcaggcgatccatcgctgcgatggtggataaacgatgggcaatggcaatcacagttttattttccatcatcttatcgagactttcttgtattgccacttccacttctgaatccaatgcacttgtggcttcatctaacaatagaattggtgcgtcttttaacattacacgagcaatggcaattctctgacgctgaccaccagaaagttttaccccgcgttctcccacatgggcatcatagccttttctaccttgagaatcactgagaaatgggatgaaatcagcggcttccgctcgttcagcagctaaaaccatttcttcatcagtagcatttgggcgaccataaataatattgtcacgtacagaacgatgtagcaacgaagtgtcttgagtgactaaaccgatttggcgacgtaagctttcttgttgcacattgagtacattttgtccatcaatggtaatttcgccttgttgtgcttcataaaagcgaagcaataagttcacaatcgtagattttcctgcaccagaacgaccgattaacccaaccttttcccctggtttgatagtgagattgaaatgattgagtaatggttttgtcggatcgtaagcaaaggtaatattgttaaacttaatttccccttgtttcacttgtaacggtgacgcttgtggtttatccacaatggtgtgaggtttggttaaagtattcattccgtcgtttacggttccgatattctcaaacaaacgggcagattcccacataatccagcgagaaagcccatttgcgcgtaatgccattgccgttgccgttgctattgcacccacgccaacttgaccatttttccataaaataataccaagtattgcagtacttaacgtaagtagaatatttgtagcgtaagtgagtgtatctagtgatgttgctaagcgcatttgggcgtgtactgttaccataaaatcttgcatagaacgcttggcataagtagcttcgcgtgagccgtgagaaaataattttactgtagcaatattagaataagcatctgtaatgcgtcctgtcattaaagaacgagcatcagcttgtcgttgtgcggtttttgatagtttaggaattagggttcgtaggatcaaaccgaagagtataatccaagtaataaatggtaataagaaccaagaatctaatgccactagcactacgccagaggtaataaaatataccaatacataaacgaacatatttgcaagtgtaagtactgtgtcacgtactgcaagggcggtttgcattacttttgcggatactctacctgcaaattcgtcttgataaaaacttaaactttgtccaagcattaaacgatggaaattccaacgtaatcgcattggaaatacgccttgtaaggtttgtaaatgcacggccgaagctaaaaatccccacacaatactaataagtaatagagcagccattccaattaataaatgacttttttcttgccataatctttcaggtgtaaatgtgcctaaccaatctacaagcgttcccataaattggaataatacagcttccattacacctgtacctacggttaaaattgcgagcaaaaaaatccagcctttcattcctgtaatactagaccaaataaaacggaacaaaccttttttaggtgttgttggattgctttctggatagggatttaaacgattttcaaaccacgaaaaaattttgttaaacatatcttttccttaaaaagaaaaggcaacgcgggttgccttttagaagtgcatattattatagcacaaaaacaaatcaatttataggctgacagattttctgtattggcttggagaaagttggtagtaatttttaaaaactttacaaaaatgcgcttctgattgataccccacttctaaagcaatggcaagcacagattgttgtgattgttttaataaaaacgccgcagattgtaaccgcactttcgtgagaaaacgtcctggcgacataccaatatgttgttgaaagatacgaataaagtttgcacgagacattgttgcaagttcagctaattgttcaatatgccaatcattttgaggttgttgtaatattgcgatcagtgcagtatttaatcgcttatcttgcaaggcaaataagatgccttgttcaattaaattttgttgaatagcgtggcgtaaaatataaattaaaagtacatttgaaagtgcatcaacgacggatttcgtacccgcatcatttttttgcgcttcttgtaaaaaaagctgtactaaaggatgaattggcgtgtcgcataaatttatatgtaaatattcaggcattgatgctgtaagaagcgcatcttgttgataataaaaattaccgcagaacatttttaaatctggtgtacctcgtccaatctgatgtaactcaaataatccttgatgacttttttttgtaggaatatccgctcttttatttgctgaataatgcatagagtgcggttgattttgaggaagaaaaaaaacatccccctcttttaaatgaaattgtttttcatttagtgtaagccagcactcgccttgttcaataagatggaatatgccttttcctgcatccttttcttgatgagatatttgccattcgccttgaaattcacagcgaatattaatttctccacgcacttgtgctaaatgggtaagtttatctaaatagtccataatgagatgttagcgataaaaattgagataaataagcaagtatcataatctaatccgcctataatttgccacaccagttggttattaattcaatatatttaggagaacattatgtttacagattggaaagaacacacatctcacgttaaaaaatcatttggtgaattgggtaaacaacaccctaaaatgttacaagcttaccaagcattaggcgcggcggcagcagagggcaatgtgcttgacgctaaaactcgtgaacttatcgcattagccgttgctgtaacaacgcgttgtgaaagctgtattagcgtacacgcagaagaagcggtaaaagctggtgcaagcgaagctgaagttgctgctgcattagcaacagctatcgcattaaatgcaggtgcagcttatacttattctttacgtgcattagaagcatatagcgtacagaaagcttaattactcatcattccataaagttaagttgattaagagaaagggagcatttttttaatgctcccttgttttgttaaggttgtgttttaataatacaccactctatttttcaagcgatgcctcccctaaagggaatgactccgtaaattgttcatttttctgattgtcagtaaaaaacggcaaaccgatcaaacgataatgcggtgtatctttttgcagaatcttatccgtcccgtattccgctgtaattgcctctaaaaaagctgctttccacgaatcatttttctctaaatgcccgccttttggttcaatgaaaatttggtaatgcaaaaagccatccacaccattggaagaagatttttgtttatctttcagcaataaaataaagtcgggcataaaacctttgccgttatcaaaatttctcaatttgagcacttcttcattgcggattaaatgaacgtcatattgagatttcaaattgcccaaacgctctgaaataaattgaattaacgcttcttccaaactcgttccagcaaaattatccatcacataccaatcattttgcgtggcaatagtcgtttttacatcatctcttttgacccatttttgttttggtgtgccaaaaattccccacaattttttaggtgtaaattcttttgtaccgataaatggcatatcactttcattgagacgtttttcaaccttttccaagatttttaggcagcctgcaagtttgtcatctgggctaatctgtttatcttgccctaatcccaaaaatttaatttgccaatcttttaacaagttattttgcaattcattgcgattttgaatgttgagtttgctttgcaagcgatcgaaatgaaataaagattgactattttttcctttgatatgcaaggctttattaaaaatgtgtcgctccatttcactcatttttatggttcgaggaaaattattttgcgtgccaagttgcaaggctatttcatcatttgcatcagctttaaattgcgtttcctgcaacaattgattgcagtgaacttggaatggaggcgttggcggattgtcttttaggctgtctgcattattggctttggcattgggattggggatttttttattcgcccaaattaacaactctctaaaatccttattatcagcaaattcagatttgagtttaaatgttgccaataccttatcatcgtctttttcaggcaaataaccgtcttttcgcaactcgttttttagttctgtaatatagcgggattgctcatcgtgcgtgtaataaaacaattcttccaaaatacgcaattcgtgttgcatatcgttgtcaaatttgcgtttattcggctgtttatcttcaaacgcaaatggaaaataacgcacgccgcgaccaatcaactgcttttccgatacggtagcggcagccgttttgcccttcatataaacgcacaatatcaaacaaattcagaacgtcccaaccttcggttaatctgtccaccgtaaaaatagcgcggatcggattatcagctgcttccaaattatttagcaatttttccgtttcgctgtcggttttttcttttttggttttgttgctctcggagttggtaataatcacattatgtttttgataattttgttttacccaatttgccaaatgcacaaactcaaagccattttcctgcataaattttagggcttgttcggtgcgggttttgccttgttcgttggcgttatcgctatcgttcaggcttgttgaaaatgtcgttaaaaacgaaaaatcatccgcttgcacattttctacccaatttaaaaatgccaaataatccgcttttgattcatcaatcgtcttacttctaaacaacatcacaggcttgaaattggcaatgccatatttcaacgcaatttgatggcgataccaagcaaacaataaagcgtgcaatactcgctcttttttgtccagcgtactggataccaaattgatttctttggtataacctttttgcaaaaattcttttaacccaaattttgtgatgattttatcagcgtatttttgttgcacgtcagcattttcaggtagcgtggcggtaaattctaacagcacattttggataggattgccatctttattgagtaagaatttcaaaaccatatgctcccagcctttgagttcaatttcggcattgctagtgcggtcgttcatttccttttctaactctaattcgccttgttttttgcctttggtttgcgcgtttaaatggtgtgcttcatcgcccagcatcacaagattcaattcgttcaaatccgccaatgtggtttggttttctcgttggatgtgaatatcgttatacagtttttgaatgctggtaaatttaatttcaatgccgtctgaatattggctaaacgtttccactttgcgaataggaattaccgtatcgccctgcaaaatcttctcggtaaataaaaattttgcgtgcgttgggtcaataaaattattttccgttttatccacgatattgttttgattcacaaaaaacagaaaatgccgataccctttttcaaaataatacaaaatcaacgctgccatcatcatcgttttgcctgcacctgttgccatattgaacagtaaatgggtagggcggtttttgatgtcgggaaaatcctttaattttgaagtgcggtcaaaaatcaaaaagttttctaatgcggacttttgccattcaaaaaatggatattttaaattgcgttctacaaattcaggcagtgcgaaaaaatccgtctgctccatttcttctagggttgatttgcggtcttccacccaatcaaacaaagttttattattcgccatcttttttctccgcttgattttttactgattgatagaacgcacggcttaacactttatcgtcatcgttcaggcagtctgcaaattgttcatcgtccatttcggataatgaaacatacatttgatttaaatccaacatttcaagcaccatttgtttttgttcgtctaatggcaaagattgaaattcaggctcgttaatcatttgacaaaattcatccacgctgacgttgtattttaggaaatagcgttcgtataattcattaaacagcgttttgatgtcgtctaaattttcgcacgccaaaatttgttgttttgcggtttcgttaaatggtgcaagttctgcataaacaaactcgccaccaccttgccaattcagggctttggatataccgccttgctcgccatcaatcacttttttcaggcgttcaacggcaagcgtttcaatataatccatttgttcaataccgatgtattggcggttcattttatgagcgacggcggcggttgtgccactgcctaaatggtagtctaggacgatgtcgctttcgttggttgctgttttaataatttgtgaaattaaacgctctccttttttgccatttttaaaatctacgctcccttcttttccaacatttcccatatcaaggtaaaaaccttcccaccaattaccacgaattttacgaagtccctcatcattattataattatcagtttttccccaagaatcttgtagtcttaataattggcgaactttgccatttttatctaatgtaagaatatattttcttccatttctctcaacttctttccatttgctattttctaattcaacggataaatcaaatccagtaactttatcgcttgctacaatcttggcaagatgtgttttcacaatctcggcaaattcattacttttcttaaatgcttcttttaaagaaagtgcggttgtattttttaaatcttttggaaatctataatcatataattctttaagttgcccaatagtcccatcgttttttaaatatagcgaatagtgttcatcatattctgaacgcaaatcatacaagggatttattgcaatatttttatgtccattttttgaaaaaactataatatattcagcatttttaacaatatttccatcttgtgccgctttaactttcattccttgcgttgtggacatttggcaatgaatggttgtaacaaaattttcacgaccaaaaacttcgtccattaaaattttcaaataggcttgttcattgtcatcacattgaacaaaaatcacgccatcatcagccaacaatgttttcgcaatttccagccgatttttcataaaagtcagccaagtggaatgattaaatctatcattatagttaaagctatcgttgcccgtgttataaggtgggtcaatataaatcagcttaactttgcctttaaactgcttggcaagcgaatgcagggcaatcagattattgcctttgataatgaggttttcggcgggtgtgccgtctgaatggcgtttgatttcgccaacggcttgtttgccgtctgcggtgtagcgagagaattttgagaatgcttttgcgtcaaaaagtcgatcaatttcatcaaaagcaagggtttgattaaaaaagatttcttgtctttttcgggttaatttagtgtataattggctggctggctggctggctggctggctggctggctggctggctggctggctggctggctggctgttattgcgtttaaaataaatttcttcgccttcttcggtgctttgtccgccatttaacacacaatctttaaacggaaaatccaacacaatatccgaactgtctttcaaaaagcgattgccgtccgtcaagccaatgcgattggcgtattttgtgtaggaattattgattctgtgtttgtccaagaaaaaacgaaaatcctgcaatttaaacaccaaaacatcattcacttccacaaagaaatggcgttttaactcatcattccccaataacaacccgataatagtcgggtcggttttttccaccaaatccaacagaatgtttttggctaaaatggttttttcttcgttcgcccatactttttcgtgtgatagtagggcttgggttaattcggtttgaatgtctgtcttcatcgttatcaatcctcataagtcattattttaatgtgctattacaaaggaatagcagagtgtttaggtatatttatcgaccgtacaggtttaattactctcttaacctgttttctttgactcacagaagtcaaaaaattttgtttatctgcatcagattttagtgaaagcatcaacacagtattaaaacacagcctttgttaaaccaaattagcattctaaaactgttctagtgcttttttcactggggcaaagctacgacgatgttgcggtaacgcaccaagttcagctaatttttccaaatgtaatttggtcggatagcctttatgctgggcaaaagcgtattctggatattgcttgtctaattcttccatttcttggtctcgtgccactttcgctaaaatagaggcggcactgatttctgccacaaggctatcgccttttaccacggcttgagctggaatatctaaatcttttgggatcttattaccatcaatcaacacaaagtgcggttgaatttttaaagattttaccgctcgagtcattgccagcaaggaggcttgcaggatatttatctcgtcaatttcgtcagcttcagctcgacctaatgcccaagcaagggctttttctttgatttcttcagcaagggctaaacgttttttttctgaaagttttttagaatcagctaatccttcaattggattatgaggatctaaaatcacggctgccgtgacaaccgccccaactagagggcctcgcccaacttcatcaacgccagcgatcaatttatagccttgtggatattcaaacattttttgttccttctaataaatcaatgactgcttgagccgcttgcttatcggcattgcattgaattttttggtgtaaatccgtgaagtgctgaattaaaacatggcgattttttaccgaactttcatcatctgaaagataagcagatagtttttcagcaagcaattctggcgtgcattcttcttgaatcatttcaggaacaagcatttcattcgcaagcaagtttggtaaagaaatataatcggttttcactaaacgttttgctaagaaataggtcagtggtttcattcgatagccaactaccatgggggatttacaaagcattgcttcaagtgctgctgtccctgaagcaagcaatgttgcatcagctgcgatcattgcttgtcgtgcattgccatcaattaaatgcaggtctagatttggcgtaattttagctttaatggtttcaaattgaattcgtcgtttttcgttcactaaaggcacgaggaattgtaaatctgggaattgttcttttaataataaagcggtttttaagaaaggctcagccagaaattccacttctgaacctcggcttccaactaagattgctaaatagcgttgtgcgggatcaatctgtaacgtttggcaggcttcggcacggtttggtttgagcggaatagcatctgccattgtgtgcccaataaaacggcaaggcacattaaatttatcgtaaaaggctttctcaaaaggcaaaaaggctagaacttgatgagtcgctttggcaattttatggatgcgattttgacgccaagcccatacagaggggctaacgtaatgaatagttttaattccgtttgcttttagtttaagttctacatccaaattaaaatcaggcgcatcaatgccgatgtaaacatcaggtttttcttgcaacatagtttgaatgacatttttgcgaattttcaacaggcgaggaagatgttttaatatttcagccaagcccataactgaaagctcttccatatcaacaagagtctcacaaccttcagccaacattcttgggcctgcaatgccaataaagcgcgcattaggataatgtgctttgagctggcgtattaatcccgccccgagaatatcgccagacacttctcctgcaacaagagcaatggttggatttgttttattcatcaaatttatcctaaaaaataaccgcactttggtgtgtaaagtgcggttgaaaatgaagaagttttattaacgaataatcccgcgagttgaacgtttgaaaaattcaacaaaaaaactgatcgctgaatcggtttccgcaatttgctcaatttctggtaacacttcttcaagtgttttaccgctacggtagagcattttataaatgttacggattacgtgcatagttggtttatcaaaaccacgacgtttcaaaccctctaagtttacgccaaatggacgggcgtggttgccttgcgccataacataaggtggtacatcttggcttaccatagaaccgccgcctaacataacatgtgcgccaacaatcacaaattggtgaattgctgacataccgccaacaatcacgaaatcatctaattctacgtgacctgcaagcgttgcattgtttgccagaatacagttatttttaatttggcaatcgtgcgcaacgtgaacattaatcattaataaattgttattgccaatagcggttatgccacagccttgaatcgtgccacgatggattgtcacgtgttcacgaattttattgctattaccaataatggtttttgtagcttcgcctttgtatttcaaatcttggtttacttcgccaatactagtgaattgataaatttcgttatcttcgccaatcacggtatcgccacgtaccacaacgtgagatttcaatacagtgcgagctttgatttcaacagtaccctcaataatacagaaaggcccaataaaaacatcttcgccaattaccgcaccttcttcaatgagggcagttggatgaatttttgcacttgggtggatcatatttaccccttaattaacgacgagcacacattagttttgcttcacaagcgatttctccgtttacggtggcaacgccagtaaatgcagtaataccacggcgttttttaatcacttgaacgtttaattccatttgatctcccggtaatactgggcgtttaaagcgggcttcatcaatacctgcaaagtagaatagttcgccgccttttaattcgtgagttttaaaggctaaaatgcccattgcttgtgccaaagcttctaaaattaaaacgcccggtaaaatgggttcgcctgggaagtggcctgtgaaacaaggctcattgacgctgatatttttaatcgcttttaaccattcgccttctttaaaatccaatacgcgatccactaataaaaatggatagcgatgtggtaataaagtcataatttcttttgattcgatcacttttggttgttgttctgacacgttgataccttacaaaaaataaacaaataaaatctgtcggattatacgatatttatagctaaaaataaaacgcactcaatatagcctagtgtttaggacgaatatcaatggctggatcgtcatctttacgatatttttcatcaattcgtttttgcaatccaaagtcatttttatccgcttcgttagaaaataaatcttctgtttgcgttaattgaggatttttaattcctatccaatttgcgattccttctaagaagttcaaacccgatttaaacaccttatattctttgcgttccatatcatctgatgaaattttgaatagcggaatattatggtgctctcggctgaaacagttttgattgaacaaaagtatattgtttttttcatcttgttggtggcacaaaccgtgatctgagaaataaatcattgaaaaagtgcggtgatttttcttcacgttttcttcaagctgatcatatacacgttttaaaaattcgtcagttttcttaatagatgaaacatagcaatttaaataaccatatttcgaattaagatctttatcatcaaagatttttggataatcttcgatacgatcgcaagccattgggtgtgaaccataaatatgcaacacaataaaacgttttccttgaacagaattttctaatacttgggcgaatttgggtaataaatcaaagtcactaaagttagtcgaattaaagcttccgccttttttcaagaaaaaggtttcatcagattttgaagcgagggatgaaacgggcgtatcgaatttaccgagcataccttgattagaaagccaataagttttcacgcctgcagatttgatgagatctactaaactcaaactgtaattgggttcccatttttctttgtctggaaaggttagcattaaacgaagtgaggcgacggtatttgttcctgctgaacgaaaaccatcaatcaacgtgcctttagcgttagacataaagggggtgttttctattggataaccgtaggcatggtggtaatctttccgtgcactttctccgagtacaattacataatcatcatagcgtgaattttctaatgttgattttccccagttatcagattgagagatttgttttagtttttgtacttcatctacaatttttaatgtggaacttactgtttctttgagcggttcagcaagcggcatgttgtaagcaaaaagcaatgtcgccaaggcaataaatgttttattacgataaaattttatgccaaatttcaccgcacttttgtactgaagaaaaatcaaaataggaatggcgaaagcaattaagtaactactcactgggatttgcaatagaaattccttcgtttctaatatatctgtcgcgaaaagcgaggcgatatattggtagcttggagggccaaaatttagccctgtaggcgtataaaaagcatgcagtaacgtaagaggtagcaaaataaaatagaaggattttttactgctgcttaataagagaatagttattgtcgcaagcagaatgagagccacacttggttctgtaaacattccagaaccgattaaaataaaataacccgcgaatgcggcacaaatcactgcaaaaagtgcgggcaaaatttggcttgtttttttcgtgttcatcattgtcttccctgaaaagaaaatgtcgctattatccacctttcactgagaatttccatatttaacttcttcactcttgagcggttattttatagaataagccaattttttaagccagaaggaaaaaacaatgagccaaccaatttataaacgtattttattgaaattaagcggtgaagcattacaaggagaagatggtcttggtatcgatcctgcgattctcgatcgtatggctgttgaaattaaagaattagtggagatgggcgtggaagttggtgtcgttctcggtggcggcaacttattccgtggtgcaaaactagcaaaagcggggatgaatcgcgtggtgggcgatcatatgggaatgcttgctacggtgatgaatggtttggcaatgcgtgattctttattccgtgctgatgtgaacgcaaaattaatgtccgctttccaattaaatggtatttgcgatacttataactggtctgaagcaatcaaaatgttacgcgaaaaacgcgtagtcattttctctgcgggaacgggaaatccattctttacaactgattctaccgcttgtttgcgtggtattgaaattgaagctgatgttgtgttgaaagcgactaaagttgatggtgtgtatgattgtgatcctgcgaaaaatcctgatgcaaaactttataaaaatttaagttatgcagaagtgatcgataaagaattaaaagtgatggacttatcggcgtttactttagctcgcgatcatggcatgccaattagagtgttcaatatgggtaaacctggagcattacgtcaagtagtgactggtactgaagaaggcaccactatttgttagtgaatgttgaaaagaataatattaaagaaaatacataattaaattaaggactaaactgttaattcattgagtttagtctttttaatttaaataaagcattacggcaggaatgaaagttttcgtaaattctgtttagtcttcatagttggattatttagatataaaaatctgcactctaataagtgagaaagttaatcaaacttttagaatgcagattaattttttataaaatttcagtttaagctacagtgagttgtcccgcatataaaataaagaaacgtaaacaaaataccccaattaagtcaaaaattgacaccaagataataaagttacgattgtattttaaacggtcattaacaaacatattggcgattaatgggatcaagataccaataatcaatactccaacccagaataccactccccaaaaaccagataaggcattatgtaacgcaactgttttttgtccgccaccaaaatgtaatccaacaaagaaacacacaatcaaaccaagttctgtcaccataattggcacttcaaatctgtggatgaagtgcgattcgtgagaatcaccttttagttttcctgcaattaagataattaagaaggttgcagcaataccagatgatgtgccagaagctaagaataatgcgggtaatacggggttatttaacattggatagctaatcaatgcagaaagtaagaaccctgtgtatgctccaagcacagcagccaatatgaaaagaataacttcgactggacttacaatacgttctgcaataccgatgagtttcatcacaaattgcagttttggtataaagcgattaattaatgcttcgatttcttttttgaaaatcactacaccccaaattactaaaaataacatatagatttggaatagcatgacccccatcgacattacggagttgaattgatagttaaacatcaatttccagaatgtccaaggtcgagtcaagtggaaaattaatagcgttaaaccaattaatgttggtacagaccctaaaattaccccagatcgaataatccagttttggcttagattttctagtttattactgcgtttataggcaattgctaactgtaccgcaccagatgagatccccaataaaaacaagtagatcgcaatggtataatcccacactagattaggcgtatgaaatggaactggataatctaacgtcatcttctaggctccccatgttggaatggaatgtgatataagtttggttgtgtacctaattccactttagtgcgataaaccggtttttctttcactttacgtgaaactgcacttgttggatcattcatatccccaaaagttaatgctttggttgggcaagcctctacgcaagcaggttgtttaccattggctaaatttgtatcgcggcagaagttacatttatctgcggtacgatgtattggatgaataaaacgtacacgatatgggcaaactgctatacagtattggcagcctatgcataaatctttatgtacatctacaatgccagtctctttatcaataaaagatgcaccagttggacaaactgctacacaaggtgcatttgtacaatgttggcaagattgacgaaagaactcgtattcttgatttggaaattccccataaggttcactacgtagaatctctaagcgagaaacgccttctggcacttggtttacatcacgacatgagtccatacaggctgtacaaccgatacacgcattttcatcatgtatcattgcgtaacgtttaggtttatccgccttgtcttcttttgcaaaagcaggtaaagatgttcccgtcataaggatcacagcccccatgccagaaacaaagtttcggcgtgagcagactgtcatagtttatccttttgttcgattagtttatcttgttcagctttacgtttttgttgttcgccatgacaatctacacaaagtttaacgcgttgttttggttgaatccccttcattgcatcttctttagggtgaagcgtatggcaacttgcgcaaggcaatttcattgcgtgtacatcatgagcccataatttttcacgaagtttgtcaggttgatggcaagcaaaacaaacttggttttgttcttgaacggaatacatcggttttttattaccgaaaatatctccttcaaaacgcataacatctttagcaccgcgacgatgattttcggaaatattgccgtgacagcttacacaagtaatagctttaccgttatttggatttttcttatctaaatgtgcaccgtgaaatttaccaaagtggagttcgccaccagactgatctagcgtttggtttttatctattttgtcgaatttatggcatttagcacaatattgattaggatcgcgttggttatctaattgcggttcataagtaacatgatccgcaggtttttgtgcatcatccgcatgagccaaaaatggcgctgctacaaatgccacaattaacgctaacgcttttgcagatttgttgattaaagaagttaaattcatttgggttacctcaaatttgaccttgaaaatcaccgcactttctagtttgcactaaaaagtgcggtgcatttttcatttatttttgtgctggtggatcaactaataagcctttttctctagcttgttgttcccattgtggtaccacagtttttaagaattcttctttcgctttacgttctttttcaatatcaatacccattactttccacgctttatcagcagttgaaatatctgggatttgaactggagttttcacaccgtgtttagttaagattacagcaagtttagtacgtgcgtctgctactttatctaagccagaagctaatacacgaagtactacttcaggcgcatgcatatgaccaccatggcttgcagcagtgtaatcccaacgccattgagcatgacgaatatccattaatgctgcttccatttcttttttagttgcacctgcgtcccaagcctcttttgcttcaaagtgagctttgacaacttggtcttctaaacgacccattacatctttcacttcttttttacgtgaagtaacaatatcgcgtaatttttctttgctttgatcgtgacaatttgcacaagtgtggtcaaatgcatcgaatggattttggatttggtggtcagtataaactttaccgtctgcgccttgtactttcggcatatggcaatctacacaagttaccccatttttaccgtgcatacctaaagaccaaatttcaaagtcagggtgttgtgcttttaacattggtgctttagaaagtgagtgagtccagtcagtgaaaccaatatcatcataatatttttcaatatcatctgcggtttgaccattatcccaaggaaaggttacttgctttatgtcgccagcgaagtagtattctacgtggcagtttgcacagatttcagcgcgtttttcagtacgtgctgccgagttgaagcttaaattgttatgtgggcgaccttccgctttatcttttgctgcagtggctttttctaaagcgtcaagtgcgcgtaatacgtgtggacgagcaatacgtaatgctggtttgccttctgcaaaatctttagaggttgtatcgtgacagtcagcacaaccaattgagttcacgatttcaggtccaccttttgcccatttcgcattgaaataatctttttccccccattccgcgattaaacgtggaacatcagggcctttacatgtccaacatgccatagcttgagggccatcatttgcagtttttggcgcacctgtacgtaaaatattacgcacatctgttaccgcataaaagtgaccgcgtggtgcgttatattcttttgcaaacgcataacctccccaaagtacgattaggcgcggatcttcttcatcagcataaataattttttcgccattaccgtttgctgttgaacgccagctgttatattgatttggatatttttctgcaaatttttcatttacggattcaattttcaaatcaggttttgcgggttcaacaggttgttctaatggcttatatacaagctcagcagtggctgagttaaacaagcttaaactcgcgaaagacgctgccacaataaggctttttttgaatgcgttcacgataatcactccatttgttgtaataaaaaggttaagtagaaagttgagaattattcttaatatccacacaaatgtagatatatattttcattcgagcgtaagataccaaaagaaaaaagtttttctactcgcagaatgctaaagtttgagcttgatcaagcttatcttttaaaatacttaaaaagaggtatattattgttttaaataaattaaggcggtataaaaccgccttaattttgagtattattatcattagtattgactaataatatttgctattcttttatctgatatttgatacttcgtccccaactgctgggcaaataaacttacgcgcaattcctcaatcatatagcgaatttccgcaatttcatcagaaatcggtttagattttggcagtttagccagtaattgttggtaagcctgttgtacttgttccacgcgtagcatcgcggcacgatcacggtttacatcttgagccaacttatcaatacgtttatcaatggcttgcagataacgttgtaaatctggtaggcgatcataaccgctcttttgcacaaaaccttgatacaccaaacttgcaagttgcgatttgatgtcggataatgcaaatgccatcgtgaaatccattttgcctttaaggcgttggttaagttggtaagtgagagtaagaatctgctccactttctgcgcaatatccacggtcacttcgttaaggttttctcgaacgaaatcacgcaatttttcaaaacctgcttcatcccatacaaaaccgccaaaatcggcaattagcttatctacggcacaagcaatacagtcatcgatcaaatccaatacgcgaccgaacggagtaaaatacagccccaatttggccttattcggcaatttttcatgcagatatttaatcggtgacggcacattgagcaataacaaacgacgtaaaccttgttgcattgccaccgattgctcaaattctgtttcaaacagtttgatacctacggcatctttttcatctacaatagcagggaacgctttaacgctgaaacctcgttgtttttgttcgtaacattgtggtaaatctgcaaaactccaaatatgcagcccactttgctcaatgccatcatctgccacagcagaaatactttcctgcacacgatcttttaagttgaatttcagctcatccaaattcatggattctgcgattttcttaccgttttcatccaccacacggaacgtcattttcagatggcttggaatttgtttccaattccaatgttccgcttctacggtgacgccagtcatacgacgcaattcataaatcagcgtatctaataatggcttttccaacggcaccgcacgacttaaaaaagcttgagcataattaggtgcaggcacgaagttacggcgataagatttcggcagcgatttaatcagcgcaatcaccaactcttcacgcaagcctggaatttgccagtcaaagcctgtcatttccacttggttgagcaatggcaatggaatatgtactgtcacgccgtccgcatcggtacctggttcaaattgataagtcaatttgagttttaaattaccttgatgccagaaattcgggaaatccagcttgctcacttgttccgcatcatcattgatcaaaaatgaacgttcaaaattaagcaattcaggatctttttgctgtgcctttttccaccaggtatcaaaatgtttttgagagacaacttctgtgccaatacgctgatcgtaaaattcaaaaagcgtgcgatcatccaccaaaatatcgcggcggcggcttttgtgttccaattcttctacttcttgaacgagcctttgattttctttgaagaatttatgcttggtattccaacccccttccaccaaggcagattgaataaaaatctcacggcttaccgttggatcaatagcaccgtaattcattggtcgcgcagccacaatcggcacaccgtaaagtgtgactttctcatctgcaatcaccgccccacgagatttagaccaaaggggttcggaataggatttttttattaaatgctcggcaagtggctcaatccattctggctcgatttctgccaccatgcgcccccaaagtttggaggtttccactaactctgccgccatcacccatttcggttgttttttgaaaagcacagaattggggaaaattgcaaaatgggcattacgtgcgccaagatattgttgtttctccgcttcttttaaaccgatatgagaaagcaaaccgcttaaaagtgcggtatgaatttgctgatattctgctttttcagaattaatcggtaagcccatttcacgcacggttaaacgaatttgatgataaatatcctgccattcacgaatgcgtaaataatttaagaaatccttttggcactgacgacggaattggtttttactcaatgctttttgttgttcttgtagataacgccaaagattgaggaaagccaagaaatctgattttttatcggtaaaacgacgatgtttttcatcggaagcttgctgtttttcttgtggtcgttcgcgcggatcttgaatggataacgcagagacgatgatcatcatttcataaacgcagccaaaattgaccgcacttaggatcattttggcaaggcgcggatcgactggaagttgagcgagttggcgaccaactctagttaataggcgtttttcacccgctttggtgcgaaccatttcaaacgcgcccaattcttccaacagttttatcccatcttgaatatggcgtttatctggcgcatctacaaaagggaatgcttcaatatcatccaaacccaatgccgtcatttgcaaaataacggaggctaaattggtgcgtagaatttcaggatcggtaaactctggacgagaattaaaatcctcttccgaatataaacgaatacaaaccccttcacttacacgaccacatcgacctttacgctgattagcagatgcctgtgaaataggttcaatcggtaaacgttgtactttggtgcgataactataacgggaaatgcgcgctgtacctgggtcaatcacatatttaatgcccggtacggtcaatgaggtttctgcgacgttggtcgctaatacaatgcgatttaaaccgcttggatggaaaattttattttgttcttgcgcagacaatcgagcaaagagcggtagaatttccgtgtgttttagattttgcttttgcaaggcttcggcagtatcacgaatttcccgttcaccgttcataaagatcaaaatatcgcctcgaccttctgcttgcaattcatccaccgcattaagaataccttgtagctgatcttgatcgtcttcttccactacgggacgataacgcacttcaacaggataggttctgcctgagacttcaataatcggcgcattgttaaagtgtttagaaaagcgttccacatcaatggttgcagaagtgataataagttttaaatcacgacgacgtggcaacaactgtttcagataaccgagaataaaatcgttatttaggctacgttcgtgggcttcatcgataatcaaacaagaatattgattgagaaaacgatcgttttgaatttctgctagcagaatcccgtcagtcatcaatttgatttgggtgttatcgctgatttgatcgttaaaacggactttataccccactaaatcgccaagttctgtttccagttcttccgcaatacgcaccgccactgaacgagcggcaatacggcgtggctgggtatgaccaatcatgccaagattgccgaaacctaattccaaacacattttcggcaattgggtggttttacctgaaccagtttcccctgccaccacgatgacctgatgttcagaaagcagtttttgaatttcgactttgcgttggctaacgggcaaactctctggaaaaacaatcggattttgtaccgcacttttccgttgttctacacgtaatctagcttgttcaatttgctgttggatttcagcggcaacggcttgttgagcctcttggcttttaatttttccaataccatgaatgcgggcggataagcgacgttgatccaccagcatgatgtcatttaattgagaaaaaagagattgttgtaagggagttaatgtgtgttttaccgagctgtttttcatagcgatttacttttgaaacttccgtaagctaagctaatccatccgattaaaaataaagtgccgccaataggcgtaatccatacaattacattgcttgcttcgaaagcaagtgcgtataaacttccactaaataataagattccaattaaccaagaagacatagataatcgggcgaatttgttgtcacgtaaagcagataatgcaacggcaagtactgcaatggtatggaacatttgatattctaaccccgtatcaatccatgataatgctttggcttctaatatatggcttaagccatgagctgcaaatgcgcctagtgcgacacagaagaatccgcttaaagcaacaagagtaaggtatttgtttttcatttaaattttccctaaaaataaagctaatatccctgcagcaataaggggaccaacaggaattccacccaaaaatgctacaccaataattgtgccgataagcaagccagtgactaaaatcggttgttcgcccattaaaggcacacctttgccagcaagccatgccacaagcactccaactgcaatagaaagagccattttccaactaagaaaacctgataaatcaggcaactgaattttccctgaaactaaggggcttaaaaccccaatggttaaaataatgataccaattttaacgccatatttttcgagcaaaggaatgtgagaagataaaaaagtttgctgcataataagtaatacagcggcagagatggtaattgtgctattgttgcttaatacgccaagaataagcagtataactagtaatagagcaatagtattgaattgtaatgtcataaagtgcggttaaaaaaatggaaattttgataaatattctagcatagaaattcgtaaaattattttccattgttgttgagaaaaagatgaatagggaagttaaaaagggttcatagtgaacccttttatttagttagtaaaattcttgaataatttattcttcaaatttaccttttttttctttattgatggtgcatttcgcactagcccaaattgcaaacaatacacccactacccaaatcgcatataacattctatttctccttagtataatgagtgtttatttttatcaatgaaattagcatctaaacgaccaaacatttttgagtaagaccaaatagtataagctaaagcaatgaccacaaaaacaactgcaaaaatcagcattaatgttaatgttaattcacttgaagtcgaatcccacattaataaactttgttcaggatgtgaacttgaaggcatcacaaatgggaacattgatactgctgcagtaataatcacaccagccattgttaatgcagagaagaaaaatgcaaaaccacaacgattagctttagaaaatgcagcatttaataatgcagcaactacagctaacgcagggaaaatccaaagaattggcatttcattgaaatttctaaaccacgcgccagtttctacagcaacttctttattcattggagacgatggagcgaaatgatcgatagtgctagtaactacataaccatctttagaatataaccatacgccagctaatacgaatgcaatcaaagtcacaatagaaccaatttgacttactgaacgagcccgatcacgtaagacttcagtggttttcatttgtaaccagtttgcgccgtgagtgacaagcattgataagctaataacaccacataataatgcgaatggatttaatagctcaaaaaatgaacctgtataagtcacttgagttaattcgttaaaatggaatggaacgccttgtaataaattaccaaaagccacgccaaatactaatgctggtacaaaaccacctgcgaataatccccagtcccaaacagaacgccaagttggattatcaatttttgcacgatattcaaaacccaatggacgtaagaataacgctgccaagactaatactaatgcaatgtaaaaacctgagaaagatactgcatatacaattggccaagctgcaaatattgcaccacctgcagttaataaccaaacttggttaccatcccaatggggagcaatagtgttgatcataatgcggcgttccacttcttttttacctgttacaggtaaaagtgcggtcacgcccatatcaaatccatcagttacagagaagccaatcaataatacaataactaacacccaccaaataaaacgtagaaattcataatcaatcataatttatctcctacttatttagctgattgttcaaagtagtatttgccggtttttaacgcacttggacccaaacgcgcatatttaaacatcaaatacatctcaacaataatgaacgcaagataaagcgcacaaattaaaccaatggagaaccataaatcgcctgtacttaaattagaagcggatacgccaacaggtaagatctcgtaaatagcccaaggctgacgaccatattctgctaagaaccaaccgcactcaatggcaatccaaggtaatggcaagccccataaaagaacttttaacaataatggaatttgagtgactttattacgtaaattttgaacaaatgcgccgaatgtaagtaaagcaattaaaccaccagaggcaatcattgcacgaaatgcccaaaaattagggcctacatttggaatagtatcacgagcggcttgtttaatttgttcttctgtcgcatcaacaacattgtttgtatagcgttttaataataaaccgaaaccaagatcttttttaacttcattaaattgtgctttggtttcttcatttacttgaccatttgcttttttctcagcgcgtagttgagtaaataattcataagcacggataccactacgtacacgagtttcatttaatgcttgaagatcttttagacctataatttctttatcaattgaacgagttgctattacaccgccaagataaggaatttcaatcgcaaaatcatttttcatttcagccgtatttggaattgctactggaaggaatggagcaggtgctgggtgagtttcaaattcagcttccattgcggctaattttactggttgtgctttaccaatatcataaccagattcatcaccaagaattagcactgaaatagaggcgataaatccaaaagtagcagctacggagaaagaacgttttgcaaattcaaaatcacgaccttttagtaaaaagtatgagctaatggctaaaacaaaaaatgcgcctgtcacataacctgcagaaagagtatgtaagaatttactttgtgcaacagggtttaaccaaagatctaagaagttagtcatttccatacgtacagtttcaaaattaaattctgaacctgttggtgcttgcatccagccatttgcaaccaaaatccacatagcagataaattagaaccgaaagccacacaataagttgctaataagtgttttccttttgataaacgatcccaaccgaagaagaataaccccacaaaagtagattctaagaagaaggcaagtaacgcttcaatagcaagtggcgcaccaaaaatatcccctacgtaatgagaataataagaccagttagtaccaaattggaattccataataataccggtggtcaccccaagggcaaagttaataccaaataactttccccaaaattttgtcatatctttataaacttctttacctgtcgccacataaatagtttccataattacaagaataaaggataaacccaatgttagcggcacgaaaatgaagtgatacaacgcagttaaagcaaactgcaagcgagaaagatcaacaacgtctaacattctcaactcctttgtataaacaacattagttccaacaatgattaacaaggcgatgccttaaataatccctaattactcaactccaatcagctaagtttacattgacttatctacataattatttttaaaggttaaaaaaacaccagttattatagagataatccaaattggcggctattctactactaaacataaggataaaaaatagtaaaaaatgctatatagatcacatttttgatataaatacaaaaatagggcttatttgttatatttcatttaattgacttagatcaaattgacatttttgcaataatttttgttttaaagatgattaatttcattgtgtaagatcatattttaatatttgtctcaaccaacatcatctcttgatgtttttaactgcttgaataagtatgtagtggcatttaatacttaatttatcattcaacatttgtaatgtaattgttgatcctttccaaggataaaaaggattaagccaaaactagcattgagttcattgtgcaaatcaggtaaactaccgtcccgtctttggtagctaattatcttcgatttttgaccgcacttttggttgattttgtctgtaagatgattagctataatcatttatatcccaatacagattaggttccctatggctacaaattatattttcgtcactggcggtgtggtttcatcgttaggtaaaggcattgcggcagcatcattggcggcaattttagaagcacgtggtttaaacgtaaccattatgaaattagatccatatattaatgtggatcccggtacgatgagcccaacccaacacggggaagttttcgttactcaagatggtgcagaaacagatttagatttaggtcattatgagcgtttcatccgcacgaaaatgaccaaacgtaataacttcactacaggtaaaatttattctgaagtattacgtaaagagcgtcgcggcgattatcttggtgcaacaattcaagtgattccacatatcactaatgaaattaaagatcgcgttattgctggtgctcaaggtcacgacgttgtgattgttgaagtaggcggcactgttggggatattgaatcacttccattcttagaagcattacgtcaattagccgttcaagttggtcgtgaacatacgttatttatgcatttaaccttggtgccttacatcccaacggcgggtgaagtaaaaactaaaccaacccagcattcggtaaaagaattgctttctattggtattcaaccggatgtgttgatttgccgttcagatcgcatgattcctccaaatgaacgtgcgaaaattgctttattttgtaatgttgcagaacgtgcagtcatttcattaaaagatgtgaattcaatttatcaaatccccgcattattaaaatctcaaggtttagatgattttgtctgtgaacgtttccgtttaacttgccctgaagcagatcttactgaatgggagcaagtgctttacaagcaagccaatccagtgggagaagtaaccatcggtatggtaggtaaatacactgagttacccgatgcctataaatcagtaaatgaagccttaaaacacgcaggtttaacgaaccgtttaagtgtaagcattaaatatattgattcccaagatgttgaaaccaaaggtgttgaagtattaaaaggcgttgatggcattcttgttccagggggatttggttatcgtggtgtagagggtaaaattcgtaccgcacaatatgcacgagaaaacaaaattccttacttgggtatttgcttaggtatgcagatcgcgttgattgaatatgcacgtaatgtagcgggtttaactaaagccaattcatctgaatttgataaagattgtgaacaacctgtggtggcattaatcacagaatggcaagatgcggagggtaatactgaagtgcgtaccgatgaatcagatcttggcggaacaatgcgtttaggcgcacaacaatgtcatttggtatcaggtagccgcgctcgcgagctttatggcaaagaaaccattgaagagcgtcatcgtcatcgctatgaagtgaacaataccttgcttccacaaattgaaaaagcaggattgaaagtaactggattatctgcagataaaaaattggtagaaattatcgaagtgccaaatcatccttggtttgtcgcttgtcaattccatccagaatttacttctacgcctcgtgatggtcatccgttgtttgcaggctttgtaaaagcagcctatgaaaatcacaaaaaatctgtgaagtaattcttggttctgcaataagtgcggtaaaaaaatgaaatatttttatttggttatgatataacttgatgtttttgaagtaaaaaaatccccgttaaatttatcatttaacggggattttttataagctatttactgtttttatatttagttagtacgcttaactaatttcgtccagttataataaccatacaacgagttaagtaagtaggctgaatacattaagtatattgctggtgtctctgcccataagaaaatagaaagaatatttaatccaatccataacaaccattgttcacgataacgcaaaatcattaaaatctgtgccgcaaccgtaataattgtagttagaccatctaaacctgttgaactaccaccagcagcttgtaatgcttgaacaaaaagcaaagtaccaaccgtagtcacaacaattaatgtcatccatcctttaacagttaacgcttttgcaatcacgctttctccaccatcgytattttgcatattggctttccatcataaagtaaccaataaattgagagggcaaatatacgtaaagtacggtattcatttcgcctaagaaattcgatccccaagcgacataaaaataagtgtaagcaaaaattaatccaaagaaataattactaattttaccttnnnnncattccattcattaattaattaatgaatgaatgnnnnnaattttgaggtgaccattttcgcattgtgaattggtaatgtaaaggtgtagaagcatttaattctaaagttgtgaaatccatcacgttttaattaaagcctacattatctattattgagtttgtttcaaaaaacgctctaaaaattgaccgcactttaaatataataatcaagctcaagtggtatttttgcttgtaacaagaactgtttagtgcgctcgtgttgtgggcaagtgaagaatttatctgctgtattttgttctacaatatatccatccgccattaaaatcacacgatccgcgacatctttcgcaaactgcatttcgtgagtaacaataatcattgtccagccttcttgggcgagcatttttagtgtttgtaacacttcgcccaccaattcaggatctaatgccgatgtaggttcatctaataaaataatatcaggttttaccgcaagggctcgagcaatccccactcgctgttgctgaccgccagaaagttgggatggaaataaatccgctttatttttaagccctactttttctagcaaactaagtgctttttcacgagcttgagctttatcttgtttttgcacaacaaccattccctccataacattttcaagggcagaacggtgagggaataaattgtattgctgaaagaccattgacgaacgtcggcgtaacttcaattcatctgctttactaattttctggctaaaatcaatttttagactgccatcagtaaattccaaaatgccttgctctggtcgttcaagcaagtttaaacaacgtaaaaaggtggtttttccagaaccagaagggcctaaaattgcgaccacttcgcctttattaatttcaaaatcaatgccttttaacacatgattgccattaaagtttttttgaatattacttacttttaacatagacattccttataaatggcgagataagcgaatttcaagacgatcttgtaagaaagataaaacaaaacagaaaacccaataaatcagtgctgcttcactataaatcaaaataaattcatagtttgctgccgtaatattctgtgcgacacgaaataattctgtcactaaaacaagagaagctaatgaagtgtctttcactgtactaataaaagtattagaaagcgatggtactgaaatacgtaaagcctgtggcataattgtacgaataaatgcttgtcgataattcatacctatcgcataagaggcttcccactgccctttaggtatagcaataattgaagcacgaactgtctctgctgcataagcacctatattaatagaaaatgcaataatcgctgtcggaaaaggctctaaagtaataccgacttcaggtaatccataaaaaataataaaaatttgtactaacatcggtgtacctctaattatagagatatacactcgacataaagcctgtaacaattttaagggtaaattaggactaggcaaagtacgaataactgcaacaatcactgcaataagcaaaccacagaagaaggaaatgactgccaatggcaatgtgtataaaattgctgcttccaacataggccaaaacgagctgattacataatcagctcgttctgcactcataaatggaagactcgccaaccaattattgagtaatatcataaccaaaccattcaattgaaatctgttttaatgtaccatcttggcgaagtgcttcaagtacttgattaaattttgtaatcaatgcatcttcaccttgtaaaaaagcaaaggcagtcggagttttatccccacgatcataagcaatttttaaaccagaatttgggtgttttttaaaataatctaatacagccaatttatcattaattgttgcttctgcacggccttgtttaataagctctaagctctgtgctaaaccatccactacaagaatctgcgcacctgcagcttttgcatctttaccccagttacttgttgcagattgcgcagatttacgacctttcaagtcttcaaatgatttaatactgttatccgatgattttgttacaatcaccccaccagaataattataaggcgttgtgaaactgtatttttttaaacgctctgggcttgggttagtttggtttgcaatcacatcaaaacgttttgcatttaaccccgcatacattgcatcccattgtgtttctttaaattccactttcaaaccgagcttttcagcaactttacgaataacctctacatcaaagcctgttaattttccacttttatcatggaaagtaaatggtgcataagtcccttcagtccctactaataaagttttcgttttttcaacacgatcggcaatttcgcctgcgtgagaaaacgttgagaaagcaatagctccagttaaaagtgcggtcgtaaaaagtaattttttcattttttcttccttgtgttgtgtttgtctaagcgtgattataaaaaccaaacttatgaaaaaaaaagattatttatttatggtttatgaattttagttataaaaaattgatataagtgattactatcaaaataagaaaataatctaccgcactttcttgtagaaaaatacgtttctaaacaatgcaatcaatctactcttataaaatttcagtaaaaaaatgcctttctaaagaaaggcattaatagaaatttaagattataaataaacttgtaatgtctaatagaaaagcaacgtacctaattacgcttcatcacttccagaaaaacgttcaattttcgcacctagaccacgtaatttatcttcgatatgttcataaccacgatcgatatgataaatacgatctacaatggtttcacccgttgcgatacaacctgcaagcactaaactgattgaagcgcgtaaatctgtcgctattacctctgtgccagacaattgttcaaccccgtgacataccgctgtattcccttcaatttcagctttaccacccatacgaattaattcaggaatatgcataaaacgattttcaaaaatcgtttcagtgataatgcttgtaccttctgccaccatatttaataaagtaaattgagcctgcatatcagttgggaaccctggatgtggtgcagtacgaatattcactgctttagggcgattaccaagcatatctaaagtaatgctattttcagttacatcaacttgcgcaccagcttcacggagtttatcaattacggcatctaaagtatccgctttagtattttgacaaacaacacgaccgcccgaaatggctgcagcaattaagaatgttcccgtttcaatacgatctggcacaacactgtgctcacaaccagttaaacgttcaacaccttcaatcgtaatgtgatcagagcctgcaccagatatttttgcacccattttattaaggaaatctgcagtatctacaatttcaggttcacgagcggcgttttcaattacggtggttcctttcgcaagggttgctgccatcataatagataaagttgcgcctacacttactttttctattacaattcgagttccaacaagacgatctgatacttgtgcttttacatatccttcttcaagaacgatgtccgcacctaatttttctaaaccgctaatgtggagatcaacaggtctagctccgatagaacaacctccaggtaatgagacttgagcttgatggaaacgagcgactaaaggtgccaatgcccaaattgaagcacgcatagttttaaccaattcataaggtgcagtgaaatgattgatattagaggcatctaataaaactgcaccagtttcatcacgatttgcaattacgcctaattgacgcaaaatatttaaagttgtttcaatatctttaagttcgggaacatttgtcaatttaacaggttctgtagctaaaatagccgcaaaaagaattggaagtgcggcgttttttgcgcctgaaatattcacacttccacttaaacgagattgcccataaacacgaaatttatccatttttaaatccttaattaaactggtttaatgcacgatcgcgtttccatttttctacggtataagttttgatggttagagcgtgaatttcaccagtgctaaaataaggcattaaaggggcataaatcgtttgttgttgttttacacgagatagtgcagcaatttcatcactcactacaattacaccaaaatgtgcattttcaccttgtgcatagacttctacgatatttagcgtgtcttttaaaatttgttcaattttttgaagttccattggatttccgtttaagtaagctatgtaaaatttgcgatccaatcagataaaccaacaagatctgctagggttaataattgttttggtggataaactaatcgtactgttttgttaatcttttgacactctcgtaaaaaatcacaaagcgctgtaaaaccagctgaatcaatatgctgaagaccagataaattccattcaacaatagttttatcaagtgtactttctgacaaaaaaacgccacgttgctgccacattggtaacaaggtgctgcgagatagttccccaaacaaaaagagcgttattttatcattatttttttgcaaatcccaatttagcatagttattcatttattgattgaaaattataggttgtgaggcagattgctgcatctttgtgattaatgtatcaataccttgtttgtttaaaataccaacccaattttttatcgtatcttccagcatacttacgcctgctgctgccatatcgtaggctttccattccccacttttattgcctttacgccatttaaaatctaataggatcggagcagcgccattagtttgaataatacttacgcgaatatttacaaaattgttatcgcctaattctttttctgattcaatttgaattttttgattagaataatttgttaatgtttgtgcgtacttttgctcaatcaattcaccaaaagtcttgaaaaatttttctcgttgttctgtagaggttgatttgtagtatgaacctaatactttagaacctgcatattctaagtttacataaggcaataaatcattacgaacaatagtacgtaaataatttggatcttgtttaattttactttgattagcttgtatatcagaaaatagtttatctgacgcttgctgcattaaaacataaggacttgtttctgcaatagctgttcgtgtaaccaaaagtgcggttaatacgaaagttaaaatagtaaaccatttttttagttgagtaaggttcattatcaatctcctaatttataaaatttaacctattattctgcggattctgatttttcattgccgtctgattttttacttccgtataagaattgcccaattaaatcttccaatactatagctgatgtagtgtcttgaatttggctaccatttttaagcattgctgtatctccatcatcaaaacctattgtcaaggcaatatattgctcacctaataaacctgatgttttaattgataaagaactgttttctgggatttcattatattcttgattaatcgcaatacttacttttggtaaatagcttttttcatcaagcgtaatagcactcacacgcccaattactacgcctccaatttttagtggtgcgcgcactttaagtccgccaatattattaaaaattgccgtcacggtataagatttcgtctcagcaaaaccttgtacattagctacgcgtaaacctaaaaaaactaaggcaccaataccaagtaataaaaataacccgacccaaaattcatatttaattgtttgtctcataaaaaatccttaacttgcgccaaacataatagcagtcaaaataaaatctaatcctagaacaacaagagatgcatgcacaactgttcgtgttgtagcttgactgataccttctgatgttggcatacaatcataaccattaaaaagcgcaatccaagttacggctacagcaaagaaaaccgctttaataaagccatttaaaatatcatagctccaactcacggaattttgcataacagaccaaaagctgcctgaatcaacacctttccaatccacacctactaaggaaccgccccaaataccaatcgcgataaacaagattgacaaaattggcatggaaataacccctgcccaaaaacgaggtgcaatcactcgacgtaaaggatcaacagccatcatttcaagactagaaagttgttcagtggctttcattaagcctatttcagctgttaaagccgaaccagctcgaccagcaaataaaagtgcggtaacaacaggccctaattctcgcaaaagagaaagtgctaccaactgacctaaacttgtttcagcagaaaaatcgactaatacgacataaccttgtagtcctaataccattccaataaataaaccggacaacaaaataatgagtaacgattggacacctaaaacatgcatttgcttcacaagcaaaggaaaatgcttacgaatttgtggcttgccgatcaatgcaccaaataacataaagcctgctcgccccaatgcacggaaaaagtcgatcacctgttttcctaaagcagaaataaaattgacgatcattcaaacaattccttcatataatcttgcgctgggtacttaaagcgcacaggaccatcagattcaccttttaagaattgcaccactcgcggatcttggctttgtaaaagctgctcagatgttccttctgcgatgactttttggtctgcaataatataggcataatctgcaatactcaatacttcctccacatcgtgtgacactacgatagaagtcaaatttaacgcttcatttaatcgtttaatcaggcttaaaattacgcccatactaatcggatcttgcccagtaaatggttcatcaaacataattaaatcagggtcaagcgcaatagcacgcgctaatgcagctcgacgagccataccaccagaaagttctgaaggcatcaatgcggcagcgcctcgcaacccaaccgcctccaatttcatcaacacgatttgacgaattaaactttgaggcaaatgcgtatgttcacgaattggaaaggcgacattatcaaaagtagaaatatccgtaaaaagtgcacctgattggaataacatccccatccgcttgcgtacttcgtacagttcacgattagatagacgacaaatatcttgtccatcaaacaaaatttcaccttgctctggcattagttgcccaccgatcaatttaagtaaggtggttttaccaatccccgacggtcccatgatcgcagtgatttttcccttttttacttgcaaattcaggttatcgtaaatcacgcgatcaccgcgtttaaaggtgagattcttaacttcaattagattttgattcattaaaatctcgtttataaataaaaagttcaatcagttttatatgaccttaaaaagttagatttgtttaatttaaagattaagttttgttatttatagcaacacatttctttggcttaactttaatgtggtcataaaaatagctataaaaaatagtgataaattctatttttaataacttaaaattttgccatagtaacattctttttgacctcactaaagaagctttacatttcttcattatttattgaattttaataatactttgtttatggaaaataaacattgataaatgcctataaataataagcctgtaaaagatacagatttgataaaaaagattgcaaaagaaaagttatagagaggaaagcagaaaaacctaacttttgctaggttttcctatgtttattattttgcacagttacagtgtgctgtttttttgttcaaaacgttctgcaacgaaatcccagtttaccacattccagaattctttaatgtagtctggacgacggttttggaattttaagtagtaagcgtgttcccaaacgtctaaacctaaaagtgggaaaccctcacaacctgccacttctttacccattaatgggttatcttggtttgctgttgatacaacggctaatttaccttcagcggttaatactaaccatgcccagcctgaaccgaaacgagttgctgctgctttttcaaactctgctttaaatgcatctacagaaccgaaatcgcgttcaatcgcatcttttaatgcgccttgtaaagtagtaccttttttcaagcttttccaaaataaactgtggtttgtgtggccaccagcattattacgtaatgctccacgtttttctgcaggaattttatcaaggttagaaattaaatgacccggatacatttctactaattcagcgggtaaaccttctaatgcagcatttgcattgtttacgtaagcttggtggtgtttactatgatggatttccattgtttgcgcatcaaaatgtggttctaacgcattgtaggcatagcctaattcagggagagtgtaagacataatgtattccttctattgttaaaaacagatttcgttgaggttttggtctataaccaaaattgagcaaataatagcaaaaaaattgatttagatcattaaatgttttttcttttttaaaaagtgaatttattaaattttgttttaaatcaataaacctatcgatctacttctaaagagttatgtgtttgagttgcgaaaatttcatcaaatattagaataccaccactttctattttccctctgtaattatgtttgagcaacacaagttatctctgcaaaatttatcctgccaacgtggtgagcgcgtactttttcgtgctttgacttgcgattttaatagcggtgattttgtacaaattgaagggcataacggcataggtaaaacgagcttgttacgtattcttgctggtttagcccaatctttagaaggcgaagtgcggtgggatgctgaagcaatttctaaacaacgtgaacagtatcatcagaatttgctttatttaggacatcttttaggcgttaaaccagagctaacggcgtgggaaaatttgcagttttatcaacgaattagtcaagctgaacaaaacaccgatatgttgtgggatttgcttgagaaagtgggattattagggcgtgaagatttgcctgccgcacaactttctgcaggacaacaaaagcgtatcgcgttaggtcgcttatggctgtctcaagcacccttatggattttagatgagccctttactgcgattgataaaaaaggcgtgaaaattctaaccgcactttttgatgagcatgctcaacgaggtggtattgtgttgttaaccagccaccaagaagtgccaagttctcatctgcaaaaattgaatttagcggcttataaagcggaataacttaatgatttttttagagataattaaacgagaacttcaaattgcgatgcgcaaaaatgcggagattttaaatccgctatggttctttttgcttgtgattactttgtttccgcttgttattgggccagagcctaaattactttcccgtatcgcaccgggtatcgcatgggtagctgcattactttcagcattgctttcttttgagcgtttattccgtgatgattttattgatggctctcttgaacaattaatgctaaccgcacagcctttgccaatgacagctttggctaaagtcgttgcacattggttactcactggtttgccgcttattttattatcgcctattgcggctttgttactttctcttgaggtcaatatttggtgggcattagttttgacattgttactgggcacccctgtattgagctgtatcggtgctattggcgtggctttaacggtgggattgcgaaaaggtggcgtgttgttgagtttgcttgttgttccgttgtttattcctgttttaatttttgcttcatcaatactagaagcagcaggattaaatgtgccttatgggggacaactggcgattttaggtgccatgatggttggtgcagtaacgctttcgccttttgccattgctgcagcgttgcgaattagtttagataattaattttatttcattgtataaaagtgcggtggtttttctctttaatttttaaggatcttttttatgtggaagtggttacatccttatgcaaaacctgaaactcaatatcgtatctgcggtaaattgagtccgttatttgcatttttaacgcttatcttactcggtgttggcattgtatggggcttagcattcgccccagcagattaccaacagggcaatagtttccgaattatgtatgtacatgtgccgacagcgatttggtcaatgggtgtgtacggttcaatggcgattgcagctgtggttgccctagtgtggcaaattaagcaagctcacctcgcaatgattgcaatggcaccaattggtgcattgtttactttcttatcgcttgttacgggggcaatttgggggaaaccaatgtggggtacttggtgggtgtgggatgctcgcttaactgcagaattgattttattctttctttatcttggtatcttagccctttattctgctttttcagatcgtaacataggcgcaaaagcggcggggattttatgcattacaacggtcgtgattttaccgattattcatttttcggtggagtggtggaacacattacatcaaggggcgagtattaccaaatttgaaaaaccatccattgcaattccaatgttggttccattaattttgtgtatcttcggttttttgaccttgtatatttggcttactttagttcgttatcgcgtggaattattgaaagaagatgcaaaacgtccttgggttaaagcattagctcaaacactgaaataaagtgcggttagttttttagcgattttttataaggaatattttatgtttttccaaacttggagtgatttttttaatatgggtggctacggtttttacgtatggttatcctatgcagtaagtttagtggcagttattgccttaattgttcaaagtgtaaaacaacgcaagacagtgttacaaaatgtattgcgtgagcaacaacgcgaagaacgtttacaacaagcaaataagggggacacactatgaatccaagacgtaaatccagatttaaattagtcatttttgttgtgcttggcattgctattgcaagtggattgatgctgtatgcattacgtcaaaatatcgacttgttttatacgccatctgaagtgattcaaggtaaggataataatccgaatcaaaaacctgaagtggggcagcgtattcgtgttggcggtatggtggttgaaggcacggtagtgcgtgatccaaaaagcttaaaagtgcggttcgatttaaatgatattggtcctgcgatcactgttgaatatgaaggcattttgccagatcttttccgtgaagggcaggggattgtggctcaaggcgtattaactcagtcagcggttttaagcgcgacagaagtattggctaaacacgatgaaaattatgtgccgccagaattaggcgaaaaaatgcaaaaagtacataaaccaatggggattaaggcagcagatttaaaaggcgaaagtgagcgtgatcgtcaagaaaaagaaggcgcaaaatgattgctgaattaggaaattatgcgctggctttaagtttagctgtatcgcttatgttggcgattttccctttgtggggggcggaaaagggcaatgtacaattaatggcattagctcgcccaatgacttatggtttatttgcaagcctaagcattgcttttgctgcgctattttatttattcgcagtcaatgattttagcgtgcaatatattgtaaataattctaatactactttacccatttattatcgtttatctgcggtatggggttcccatgaaggctctttgttactgtggatttggctactggcggtttggtcatttgccgttgctttattgagtaaacatttaccccaagaagcggttgctcgcgtgcttggtattatggggattattagcgtcggttttgtattgttcgtcttgtttacatcaaatcctttcacgcgtactttccctgatttcccagtagatggaaaagaacttaatccaatgttgcaagatgtaggcttgattttccaccctccattactttatatgggctatgtgggtttttcggtggcatttgcgtttgcgattgcatccttaatgactggaaaattagattcagcttgggcacgttggtcacgtccttggacgcttgctgcttgggtgtttttaactttaggtatcgtactcggttcttggtgggcttattatgagcttggctgggggggctggtggttctgggatccagtagaaaactcatcgtttatgccgtggcttgctggtactgcattgattcactctctttctgtgacagaaaaacgaggttctttcaaagcttggacggtattacttgcgattttagccttttcactttgtctgctcggcaccttcttagttcgttctggtatcttagtttcagttcacgcatttgcatcggatccaactcgtggtttgtatattttggcttacctcgttgtggtaattggcggttcgcttgcactctatgcgtataaaggcagtcaaattcgttctcgtgataatgcagaacgctattcacgtgaaagtatgttgttattgaataatatcttattaatgaccgcactttgcgttgtattcttaggaacgttgttaccactcgttcacaaacaacttggtttaggctctatttctattggtgcgccgttctttgatcaaatgttcttaattattatgacaccatttgcattattgcttggtattggacctttagtgaaatggcgtagagaccaattttctgcaattcgtacgcctgttgttatcagcgtatttgttatgctgattgcaggttttgcgttaccttatttcttgcaagataaaattaccgtgagttcagtgcttggttcaatgatgactgtgattattgtgttacttgtgctttatgaattgcaacaacgtgcgacgcatcgtgaatcattctttgttggcgtacgcaaactatctcgttctcattggggaatgatgttagctcacttaggcgtagctatgactgtttgggggatcgcatttagccaaaactttagcgtagaacgtgatgtgagaatgaaagttggcgagaacgcacaaattggtcgttacgattttaaattcgctggtgtgacggatgaaaatggtccaaactatattggtggaaaagctcaaattgatatttcgaaagatgggcaaccagagacaagtttattcgcagaaaaacgtttttacacagtaagtcggatgtctatgacagaagccgcaattgctggtggtttaactcgtgacctttatgtggcacttggcgaaaaacttgaggacaattcttgggcgttacgcttatattacaagccatttattcgctggatttggattggcggcttatttatggcgttaggtggattgttgtgcatgttcgatcgacgctatcggtttaatgtgttgttgaagaaataattttattcttgccttcccctgcttgtgggggaaggtgcccgaagggcggaagggggattacgatatcccccctcagtcacttcgcgacagctccccccataaatgggtggagcaaagttaatgaaaaagtgcggtaaaaaatgaaaaaaaaattactcgttcctcttattctctttttatcaataacaattgcctttttagtgcaattaaaacgcaatgcgcaaggtgaagatattaaagcattagagtcagctttggttggaaagcctgtgccagcaaaaaatttgacggagttgtttgaaaataaaacttacacgaatgaattgtttcaacaaggtgagccagttttgcttaacgtatgggcaacttggtgtccgacttgttatgccgaacatcaatatttaaacaaacttgctaaagagggtgtgagaattatcggtttagattataaagatgaatcacctaaagcaatgaagtggttaaaagatcttggcaatccttatcaagttgttttaaaagatgaaaaaggttctttcggtttggatttaggggtatatggtgcgccagaaacgttcattgtagatggaaaaggtgtgattcattatcgttatgctggagatgtaaacgaaaaagtttggactcagactttaaaaccaatttatgacaaactttcggagcaacaataatgaaaaaaacatggctatttttgaccgcacttttgtttagctcggtggcgttttcagctattgatgcattaaattttagttctccacagcaagagagtgattaccatcaattaacacaatctttgcgttgccctcaatgtcaaaataacaatattgcggattccaatgcgactatcgcagtggatatgcgtggcaaagtatttgagcttttacaagaaggcaaatcaaaaaatgacgtagtggattatatggtggctcgctatggcaattttgtaacctatgatcctcctataacagcgagtacattagtgctatggattgcgccattattgcttgtgttgttaggcgtggtgtttttattaagacgcaaacctaaaacccaaagtgcggtgaaatcccaagagattttaacggatgaagataatgcacgtttggcagaattattaaacaaggataaatagatgaattttacattaatttttatcttaaccactttagttgtggcgttaatttgtttttatcctttattatgtcaattcaaagcgaaacatgggcaaaaacgtgatgatttaaataaggcgttatatttctcgcgcttggaagaaattgagcaagataattcccaaggtttagttgaaaatgttgagcaactcaaacaagaattacagaaaaccttgcttgatgatgtgccgagcaaggttcaagagaatgtggattattctggcaaatcttatggaaaaatttggtttatctctggtgtattagcgttaggaattatcgcaggtccttcttattttatggtgggatcttggcaagccgaatcaatgttagagcaaacttatgcgaaattgccctatttctttgaccgaatgaaagatgaagataaaaatccattttctgatacagaaatgcagcaattttctaccgcacttcgaatcgatttgcagaaaaatccaactgatgctaaaaaatggtggatgctcggtcaaattgggatgaatttaggtgatgcacgtttggcattcgatagctatcaaaaggctaataaacttgaaccagataatgtgcaatataaattaggctatgctcgtatattgatgttttctgaagatgcgactgataaacttaaaggtggcaatttattgcgtgaagtgattcgtcaagaacacactaacattgaagcattgagtttactcgcattccgttattttgaaacggaagattataaaatggcggcagtgacttgggcgatgatgctacgcttaatgccgaaagatgatgagcgagttccattaattgaaaaaagtattcgtaccgcgcgtgatgctttagaagcgcaaaatgaagaaaaatcaaaaagtatcactcccgaaaaataacctagtacgttataagactttttgatatagtgcgaaaaaattattcgtagtcgaacagattagcatttaataaagtactaaaggaacgagaaatgaataacaaaaattgcactttttttctttgttctgcgtcattattggaagtttatttacttcacaattttcgattgcagaaaatgattctagtgcagtcacttatattgattctgaagataaaaaagcatttaattccgatgtttcaaataatgatgctcaaaaactagctcaaagtattgaatttaaagtttataaaatagatgaaaccacttcatcagaaagtatttatgaatctccagctggaatttgtcagggatttaagattacaagaggtgtagattacacaaattcgacttaccattatctttatccagacaatagaggagaattctatggcagtgtggttggtgcaactatttataaccaaaaagatcctcaaaatttaagttatgtgccagtttattcaattacagataaagatttatctaagcgtattcagttaaaagaaaataaaacattaaaggaaaaagcagcgaattatgtattagaaggtagggctgtattaactgacgtaatttgtaaataggatgtatttaatgagaaaaatagtttttgttagttgtgtaattttaggtttagcagcatgttcatctcaaccagaacaaattggtggcggtgtttacgatatgaaaactgtgcaagaatataatgctcgagttattagtggtaatactgttacacaaactcaaaaggataaaataacgcaacaaattgatacaagtttaaaattaaaccaaagtgacaataaagttaaaacgagaacaagacgtgtattgcctgttcttccagtcacaccaagcgtcggatatcattataattatcactattttagataaaaaattatcttgtcatctgtgctaaaaattcttcttctgttaatactgtaatatttagttcttgagcttttgcaagtttagagcctgccgcatcgcctgcgataacgaaatctgttttactggataccgaaccacttacttttgcaccaagctgttgtaataaggcttttgcttcattacgccccatttgtgtaagagtgcctgtcagtactacagttttatctttgaacaagttttcacttgcttctttcacttctacagtttcccaatgcacaccttgtgcgattaaatcctccacgactgcaacattatgcgcttcacgccaaaatataaaaattcggttcgctacaacttcccctacatcaggcacttgttgaagttcttcaagatttgcgtctttaagcgtatctaaagttttgaaatgattagcaagatttaatgcagtggcttcgcccacttcacgaatgcctaaagcaaaaataaagcgagcaagcgtcgtgctttttgcattttcaagactattgagtgcgttttctgcagattttgcacccattctttctaagcgtgtgagcgtggttaaatcaagtttaaataagtccgcaggtgtatgaatcagttctcgatcgactaattgctctattaattttccgcctacaccatcaatatccattgctttacgagagacgaaatgttttaacgcctctttacgctgtgccgcacagaataatcctcccgtgcaacgtgctactgcttcgccttcaatacgaataatttgagaatcgcacacagggcaatttgttgggaaaatgattggtttagcattatcagggcgacgttcgtgtaatacgccaataatttgtggaattacatcgcctgctcgacgaataacaacagtatcgccaatagcgatatttaaacgttcaatttcatcgccattatgtaaggtggcattacttactgtaacgcctgcaacaaacactggctctaatttggcaactggtgtgattgcgccagttcgacccacttggaattcaacatcattcaacagggttaattcttcttgggcggggaatttataagcaatcgcccagcgaggtgctttagaaataaatcctagttcattttgtaaggctatatcattgatttttaataccgttccgtcaatatcataacctaacgagctacgtttgttttgaatatctcgataaaaacctaaaacttcatctgcaccattacataaacgaatttcaggatttactggaatcccgatagattttagccattgcaaacgagcataatgcgtagtcggcagatcaaccccctcagcaattccaataccataagcatttaataccagcggacgtttgctggtaatattaggatcaagctggcgtaaagagcctgccgctgcattgcgaggattagcaaaggttttttcattatgttctaacgcatatttatttaaacgctcaaagcctgcgtgcggcataaaaacttcgccccgcacttctaaacgtgctggaggattatctgttaaaagttgtaatggaacattacgaatcgtgcggatattggctgtaatatcttcgcctgtggtgccatcaccacgagtggcggcttgtgtaagttcaccattaacatacaaaatactcacagccaagccatcaagtttaggttcgcaacagaaagtaagtggtttcggtaataggattaaacgatcttcaatgcggtttacaaaagcattaaattctgcatcggaaaaagcattatccaaagagagcataggaatttcgtgacgaatttggctaaacccagaaagtggttttgcaccaacacgttgagttggcgaatctgatgtcagaaattcaggatgctctaattctagggctttgagctgatgaaataaacgatcgtattcgctatcaggcacgctcggatgatctaaaacgtggtattcgtattcatattggcgcaaggttttgcgtagattgtctagttgagtttgaatatttgtcataaaattctcggagaaaaatgaccgcacttttctatgtctttagcgtgaaaatagacaggtacacagcctgtctaaatgaatataaaagtgcggtaaatttaaggtatgaatttacacacgagcaagataggcttgctctgcatttgcatcaaaaatttcttgttcttcagtcagtataacaccttgtaaatcttcggctaatgtatgggcagcacgcatcatcatacgtaaattagcaagattattacctggagagggcaattgcataaataatacaattcctatggtgttaaattccgctaagttataagcattgaatgtgccgggttgttctaaatttgccacactaaaaagcacaggacttgccacacttaaatctaagtgacgatgatacatttcatctttacccaagataaaacccaagttttcaagagcctgcaccaatttagcaccattaaattcttcgctagattttggaataagataaagttgaatatagccagttgtttgttttggctgagctgtcgtttttgcttttggttcattgaacgagacgttgtagtctacttgatgctcttcgtgagataattctgcaagctgcactcttaattctggcgatgatgaattaatgccattaaaaccaatatttcggctttgtgcttcaagttgttctaaggtcatacttgcaacattatttgcggttggcatatcgtattgaggttgcgttggttgtattggctcggaacgatgattccccatatcataaataggttgcgtgttaggaatagaaattttgatgtcatccacacttttatcgctttggcgataatcgatcaattcagcttctgatggtaatttttctgtggtcggttgaggaattggtgtatgcccattttccacataggtatttggcgaaatattgtttggctgtaccatttcttcttgcgtatgggatctagatgttggagaagtgcggtcaaatttattggctttatcgaaatattttgatttctcacgacgatttgaccataatccgtgtacgattaaggcgacaagtgccacgatacccacaataatcaaaattgtatttaaatccatttttattccttacgcgcgatagttcggcgagagtgctataaatggtgctaatgctaccatatttcagtaggtgaaaaaaatacttcaaggtgtggaattttaaaggaaaagtgcggtctgttttaagcatatttttattgaaaggaaagaaaaatgttgaatcttaatgaattaaaatctggtttccattattttgtgatgggctggcatttcatcacacaaaaaggtttgcgtcggtttgttattatgccaattgtgcttaataccattttgctttgtggtttattttggctttttattagccaaatcagcagtgctattgattggatgatgaattttattccagattggcttagctttctcagtgtcattttactgacactttcgattttaacgattttattgctcttttattttacttttaccacgttttctggctttatcgccgcaccttttaatggtttgttggcggaaaaagtagaaaaaatgctgacgggggaaaatattaatgatgatggtctcgtggatataatgagggatgtgcctcgtatgcttgctcgagagtggcaaaaattacgttatagcctacccaaaattatcgccttatttttactgagttttattcctctggttgggcaaaccatcgtgccagtacttactttcttgttcacttgttggatgatggcaattcaatattgtgattatccttttgataatcacaaagtctcttttgatatcatgaaaaatgcacttggcaatcaacgaactcaaagtttaacttttggtggattggttacttgttgcacatttgtgcccgtgattaatttattaattatgcctgttgcagtatgtggtgcgacgctgatgtgggtggaaaattatcgtaatgacttaggttttaatatgaatagatctttttcctctcaaacggggcttgatgttcgttcagaaaatacagggattgttaaatagcctacagttataaatagatcaaataactatttttttaatcaaaagtgcggtactataaataaaccaacattaaagaagtccaacgaaaggaaaatattatgacaatttatgcagacaattcttattctatcggaaatacgccgcttgtgcgtttaaaacactttggccataacggcaatgtggtggtaaaaattgaaggtcgtaacccaagctacagcgtaaaatgccgtattggggcgaatatggtgtggcaagcagaaaaagatggcacgctcacaaaagggaaagagattgtagatgcaacgagtggtaacacgggcattgctttggcttatgttgcggcggctagaggttataaaatcacgctcaccatgccagaaacaatgagcctagaaagaaaacgtttattgctcggattgggtgtgaatttagtgcttaccgaaggcgcaaaaggaatgaaaggcgctattgcgaaagcagaagaaattgttgcttctgatccaagccgctatgtcatgcttaaacaatttgaaaatccagccaacccacaaattcatcgagaaacaacagggcctgaaatttggaaagatacggatggcaaagtcgatgttgttgttgctggcgtaggaacaggtggttcgattacgggtatttctcgcgcgattaaattagattttggtaaacaaatcacttctgttgccgttgagccagtggaatctccggtcattagtcaaactttagcgggtgaagaagtaaaaccaggtccacacaaaattcaaggtatcggtgcgggtttcattcccaaaaatttagatttatctattattgatcgcgtagaaactgttgatagtgataccgcacttgccacagctcgtcgcttaatggcggaagaaggcattcttgcaggtatttcatctggtgcagctgtcgcggctgcagatcgcttagctaaattaccagaatttgccgataaactcattgttgttattttgccttcagcttctgaacgctacttaagcacagcactgtttgaagggattgagggataaacaaaaaagaataaagtgcggtgaatttttaccgcacttttattaagactagagtagttcaatctgaatgacatcagattgtttaatccccttattttatcctttccttcttattcaaaatcattcatattctgttcattgaatttttttattaatgcagtaaactagccaccgatttttaatcacctttcttttcactttaaatgttacccgcgagtaacaaaaggacacatcatgacaaacaaagtaaacagttatggctggaaagccttaattggctctgccgtcggctatgcaatggacggtttcgatcttctcattttaggtttcatgcttagtgcaatttccgcagacttaaatctaacacccgcccaaggtggctctctcgtaacttggactctgattggtgccgtatttggcggcattttatttggtgcattaagcgataaatacggtcgtgtacgcgtactgacttggactattcttctttttgcggtgtttactggtttatgtgcgctcgcacaaggttactgggatttactgatttatcgcacaattgctggcattggcttaggcggtgaatttggaattgggatggctctagcagcggaagcatggcccgcacgccacagagctaaagcagcatcttatgttgcattgggttggcaagttggtgtgttaggtgctgcgttgcttacaccattattgctcccgcatattggctggcgtggaatgttcttagtgggtatcttccctgcatttgtcgcttggttcttacgttctcatctgcacgaacctgaaattttcacgcaaaaacaaaccgcactttcaacgcaatccagctttactgataaattacgttcattccagcttctgattaaagacaaagccacgagcaaaattagtcttggtatcgtcgtactcacttctgtacaaaacttcggttattacggcattatgatttggttacctaatttcttatcaaaacaacttggattcagtttaactaaatctgggctttggaccgccgttaccgtctgtggcatgatggctggcatttggattttcggacaactcgccgaccgcatcggacgcaaaccaagtttcttacttttccaattaggcgcagtgataagtatcgtggtttactcacaacttaccgatcctgacatcatgcttcttgctggggcatttttaggtatgtttgtgaacggaatgctgggcggttacggtgcattgatggcggaagcctacccaacagaagctcgagcaacggcacaaaacgtacttttcaatattggtcgtgccgtagggggatttggacctgtagttgtgggtgcagttgtacttgcttactctttccaaacggccatcgctctacttgcgattatctacgtaattgatatgttagcgacaattttcttaatccctgaattaaaaggtaaagccttagactaagaaaatataaaagataaaaatgctcgccaaatgcgagcatttttttatgaaacaagtcatcttataagtaatatctttataagttttcttttcactaagcaaactttcattattttgccaacagttcgttcaatttttctaatgccatttctggcgtaatatcaatcaaactttgatgataaccgccctctttgtcgcctttacggactttaattaatccgccttcaattaaacgaataatcgttgccttatccgaaagcggtggcgtatattgcggactagttgggccataaagtgcaatcaatggacgattgactgctgccgcaatatgcattaaaccactgtcattggtcacgactgccgtacaatttgcaattaaatccaccgcttcattcaagttggtttttcctgctaaattgacacaaaactcacgcaactcttcaggtagtgcttgacgaatttcttcgcccactggttcatctttagcagaaccaaatagcgccacagcatagccttgggtaattaacatttctgctaattttgcataatgatagtgtggccaacgttttgctgggccaaattccgcaccaggacaaaaaccaataattggacgctcgcctaaaagtgcggtttgtttttcaaatttttttaaggtttcagcttgttgcgctggctcaaccgtcaaatagggtttcaagacaggaatatcatcagcttttggtataacatctttttcaaaagctaatgcaacataacgctgcaccatcattggataatcttttttattggctcgtaaatcattcaataaaatataacggctttcgcctttccaaccgcgacgatggataatctttgcaaagaaaggaataaacgccgatttcaatgaattaggcaaaacaatcgccatatcatattgttcacgcaaagactttcctaaacgataacgcgttcccaattcaaaggctccgtgccctaatggcatttcaatcgccttacgcacctctggcattcgcgcaagcaaaggcttacaccaattcggtgccatcacatcaatattgcagtttggatattgaattttcagttgctggtacaaactgtgcgacatcatcatatcgccaacccaagatgggccaataattagaatattcattttctgtctttcagataaaagtgcggtcaaaaatacttgttattatggcacagagttgaataaaaatatgctcctttaacaatttagtcgaaactctttaggagtcatttcaaattctttcttaaaaacagagtaaaaatattgaattgatggatagccgcaaatctcagcaatttcttgaatagaaatatctgtttgttgtaataaattctttgctcgggaaattttttcttcgtggatgacttggtgaattgttttattcatttcattcttaaaacgttgttcaagattagaacgtgaggtttcaagatgatctaaaacttgttctactttaattcgatgacaggcacgatgacgaatataatgcattgcttgaatgacaagcggatctgttaatgatcgataatctgtagaatttcgagagtgaacggtaatcggtggaattaaaataggggtatgtgaaactttttgaccattgagtaatttgtgtaataatttcgcagcttgataaccaatctctctcgtgccttgttctacggaggaaagggacatacgcgataaatattggatcaattcttcattatcaataccaaccacacaaagctcttcaggtacagcaattttactgtactcacaagcctgcaataaatgacgagcacgcgcatccgtaacagcaataataccagtatgagaaggaagagattttaaccagacaattagcttttgttgctcttccaaccaattttgagcatgcacctgcacaccctcatataggtaaatagggtaatgatttttctccatcaactctacaaaagcatctcttcgttctatagaccaatgcttatgagtatttacttgcaaaccataaaatgcaaattgtgacagtcctttctcctgtaaatgagataaagccatttcaaccaatgccatattatctgttgctacataaggaaagtgcggataaaaatcagcttgtttataagatccaccaactgctatagtaggaataagagtgtgttgcaataattcaacagtttttggatcatcaaagtctgcaataatgccatcaatagaaagttgattaatggtatcagtatgatagataaattcatcttctacaaaaatatcccacatacattgcgatgcctgaatatattgtccaataccctccaccacctgccgatcatatactttgtttgcattaaataagagggcaattttgtagtattgttccgtcattttatatccttatctatgggaaattgctatttaagttataatagaaaagatatttagcttcaagataaaaatagccagaataactggccatttttatatccaataccacatttatttttttagcttcgcaatacctattccacttgcaccataaataatagcaaagataataccgctccaacataaaattgcccaaggtaaataagacaatgttgcaacacctaatgtgcctgccatatatgcacctgcggcagtccatggcaaaataggttcaataattgttgcggagtcttctgctgttcgacttagattttttggatgtaatcctttttctacatacgcatttttaagcatttctcctggaattagaatagaaatttgcccattacaagtaaccccaatcattgttagaccgcaaagaatggttgtaataatcaaagaaagagttgaatgaacaaaggtgagtaatttttgaataatcacggttaatgcaccgctcaattgtaatacacctgcaaatgacaatgcacagaaacaaattaatagtgttcccatcattgagttcattccaccacgattcaacaaacgacttaaatcagagctaactgaagtatggtgaatcattgaggtatcaaatccattaactgcactattaatcacatcagatagagagaatttttgaattaagatagcattaataattgcgataaatgctgataataacatcactggaatagtcggtttcttagtaatagatccccataatacaatagcgactggaataagtaatagaaagttaaaatgataaacttgctctaactcatgaatcattgtatttactttttctggagtcgctacattagaaaaatcgtagtttaaaccatataccacatagacagtagccgaaagaataaaagatggtaatgttgtataaagtaagtgaactatatgctcatataaatctacgccagcagctgcggatgcaatattggttgtatcagataatggcgataatttatctccaaaatacgcaccagcgaccacagcacctgccgtagcagccaaattggcgtctaatccaatcgcaactcccataaatgccacaccaacagtccctgctgacccccaagaggttccagtacaaatggaaacaatagcagtaaggaataaggctgtcacataaagatattctggtgatattgcttttagtccgtagtagatcatcataggaattgttcctccactaatccaagttccaattaataatcctacagtaattaaaattaatagcgcaggcattgttttagctattttttctgaaatggcgtctaaaatatctaaatagcaatgacctaatttaataactaaaaaaccagcaaataccgttgaaataatcattaatggctctgctggcaaatcaaataaagcatacccaagccctaacagtaatagcatcacaatgattggtgaaaaagcttctaatgttgttggcattcttgtgcgatgagtggttttcatattaaatctccctattgtttaataaacaaaacccatttttgattcgattcaatgcttctaataatttttctctaggcatagcgacattcatacgaaagaaaccgtctccctctttgccaaattcactccccaaagatacttttactcttgataaattattaatccaataagctaattcattttcatttatacttagctttttatagtttatccaaagtaaataagttccatcactttcagtaatatctaataatggaatatactcattgaaaaattcttttactatcttcttattattctttatgtattcttttagatagattacccaatcagtacaatatttatacaacgaaatgatagctggtatagagaaataatttggattatgtatacctaatgccatcatttcttttataaatttttctcgaatttctttattctcaataattaggttagctatttccaatccaggaatattaaaagtttttgctggggataaacagatcattgagtgatttgctacccattcatctaatgatgatattaaatagtgggagtcatttgttagtgtaaagtctgcgtggacatcatcggaaatgataaatacattatgttttttagctaagtttataattttaataaggacttctttattccaaatcgttccagttggattatgaggagaaattaaaacaaatactttagaatgtttaaaacattcctctaataaatgaaaatcaatatgatactttctattttcataaaccaaagggcattgatataattttctgtcatttaattttatcgtgtttaatattggactatatgaaggtgatagaatacatattccatcagtttcttttgtaaatgctcgtatataaatagatacggcttggattattcttgggcaaaatacaattttttcagagggaacagaataatgatattgttcgaaaatataatcactgattattttgtaatagtcggctggtaattcagtataaccataaattcctaaacgattaaatttttctaattcatctatcattatctgaggggctggaatatccatatccgcaacagacattggaataatatcattatctacattccatttagcactaaatgtatttaggcgatcaataatcacatcaaaattataaaaattattcattattcctcctgatgtataaggcaaatttactttagtcaaggaagaaaagaattaaaattactaaaactactttatctattacgttttttcacaactgtgatctagtccacaattgtaaataatcactataaaaaattaaataatgtaacgaataagaacttgtttttctataaaattaaaaaaccaccattttataaatgacggtttaaaattaataattacatctttttcttattactagtatctatccatacagcaagcaacaaaatgccacctttgacaatatattgccaaaaagttggcacatcaagcatactcataccattatcaagcgatgcgatgataagtgcaccaataacgaccccaaacacacttcctacaccaccagctaagcttgcccctccaatgacacaagctgcaatcgcatctagttctgcattttgcccagcagatggtgatcctgcacctaaacgagcacttaaaatcaaccctgctattgcaactaacacaccattcattgcaaagataatcagttttgttttctctacattaataccagataattttgccgcatcaatattgccaccaatcgcataaacgtggcgaccgaatgaagttttacgagagaggaataaccctaagattgcaagaactgccagtactaaaacaggaaatggaatgccacgataatcattaagtaaataaattgctcctaatacaattactgcaaacaaagcatatttcgtaaaatcttttgataatgcagacacttccagctgaagctgctggcgacttctacgttgataatttccccaaagaacaaatccaataactgcaataccacctaagataacccctgcaatatctgataaataaccttgcccaataactgtcatagttccactaataggagatacagttgtgccattagtcaaaccaatcaaaattccacggaatgcgagataacctgcaagtgtaacaatgaaggatggcactttgcgataagccacccaccaaccattccaaataccaaaaattaaaccaagagcaattgttgcaataatagttacaggtaatgggaagccccaccaaacatcggcaatagctgcaaatccgcccagtaggcccataagtgaaccaacagataagtcaatttcagcagaaataatgacaaaaaccattccaattgcaagaatgccagtaattgaagtttggcgtaacaagttagaaatatttcttgcacttaaataagcgccatcagtagcaacactaaagaatgccataatgactgcaatagctattaacataatgtaaacttgtaaatttacggattttaacttaaacatagattactccttaagtgctgtttccataacttgttcttgagtaagagcagtattgataaggctagctttaagtttaccttggtgcataacaagaactctatcactaatgcctaaaacttctggtagttctgatgaaatgacaataatagcaatcccttcttgtgctaattggttaattaacttataaatttcatatttcgcaccaacatcaattcctcttgttggttcatctaaaatcagtattttaggatttaacaataaacattttgcaagaatcgctttctgttgattaccgccactaagtcgtcctattggcaaatctggtgaaaaagttttcacttttagtcgtttgatggctgagccaattatttgctcttcttttgcttcattaactaccatttttccgaaacaataagatttcaaagaagaaagcgtaatgtttttaccaactcccataatggaaacaatgccgtgtttcttccgatcttcaggaaccatcacaattttatgttcaatcgcttgggcacaatttttgatatttacttgtttttgattgataaaaatatttccttcaaacttaccttcataagacccaaataagcattgcaccatgtctgtacgacctgaaccaactaaacctgcaacacctaaaatttccccctcatgaagactaaaacttacgttatcaacacgcttaatatgtgtattgattggatgccaagcagagagattttctactcgtaaaatttcatctttgatttcatgaggttcatgtggataaagtgaggtaatttcccgacctaccatcatggtgataatgtcatcttctgtcatttttgaagcgtctttcgtaccaacatgttcaccatcacgaatgacgcaaattttgtcagagatagccttaacttcattgagtttatgggaaatatagatacaagcgatattgtgtgctttaagatccttaataagatttaacaaaatttccgtttctttttcagtaagtgaagccgttggttcatctaagataagaagtcttacttgtttattcaaagccttagctatttcaactaattgctgttgccctaaacctaattctcctactcgtgtattgggatcggcatctaattgcacctgctgtaataaatttttgcaacgtaagtacatttcattatctgctgtcaaacctttatgagttatttcgttacccaaaaaaatattctccaatacagacatattctttacgagagtaagttcttgatgaataattgaaatgcctttttcttcagtatctctaatattccttgcttttagttcactttctgaaaagtaaatatcaccgctgtaatctccacaaggataaataccgcaaagtattttcattaatgtagattttccagatccattttcaccacataaagataaaatttcccccgcttctaattcaatggatatattatgaagtgcggtcacatcaccaaatttttttgtgatatgtttcatttccaacaatgccatatcgtaactccttaagaggtaagggaagagttttctcttccctcttaaagttagtgataaatactttccttagtatgaaaaccatctttaattacagtttcattaatattacgtttatcaacagcgataggatcaagtaaatacgcaggaacattttttaagccattattcagttctgcattagcttctattttttcattcttacctaattcaaccgcaatttctgccgctttatctgcaagtttcgtaattggtttataaacagtcatagtttgcgagccattgacaatacgtttaattgcagctaaatctgcatcttgcccagaaattgcgactttcccagataagccttgtgcgctaagggcttgaatcgcacctccagcagtagcatcgttagatgcaacaacagcatccacattatttttattagctgttaatgcgttttccataatttgtaacgctttttcagctaaccaagaatcaacccattgatctcctacaaccttaattttcccactggcaattaaaggatctaatactttcatttgcccttttctaaataatttcgcattattatctacaggagatccccccattaaaaaataattaccttctggttttacagccacaatacttttagcttgtagttcacccactttttcattatcaaaggaaacataaaaatctaaatctgcattattgattaaacggtcatacgctaatacttttattccttcctttttagcttcagaaataacgttacttaatacttcaccgttatgaggaataattactaatacatcaatatttttattgatcatattttcgatttgagaaatttgtgctgaatcatcaccatttgcagattggacaaacacttttgcacccattgattctgctttgtttacgaaaatatctcgatctttttgccatctttctaaacgtaaatcatcaatggataaaccaattttaagatctttggaatgggcagaactactaaatacagttaatgcaccaacaagggtaagtaaagctgatttgattttcatattgatacctcaatagttaagtgaaggactagttattgctccagttgttagttttcacactttaaaaaaggctttcaattataaaatctttctccattattacgttttttcacaactgtgatccacgccacagttgcaaataatcaacatagaaaaattaaataacataattgatgaaaagttagtttttcacaaaaatacgaaaaatttcatcacctagagaggaaaatgttatgacaacctatttcgataaaattgaaaaaatctcctttgagggagaaaaatccacaaatccttttgctttcaaacattatgatgctaatcaagtaattttaggtaaaactatggctgaacatttacgcttggcggtgtgttattggcataccttttgctggaatgggaatgatatgtttgggctaggttctttggaacgaagttggcagaaaaatccaaatttgcttgctggcgcagaacaaaaagccgatattgcttttgagtttttgaataagttaggcgtgccttattattgttttcatgatgttgatattgcacctgaaggtaattcagtgcgggaatatgtacaaaattttcatcatattgttaatattttagaacgcaaacaagtagaaacgggtgtaaaactcttatggggaactgcaaattgttttactaatcctcgttatatgtctggtgcagcaaccaatcctaatcctgaggtttttgcttgggctgcaacacaagtgtttaatgcgatgaatgccactcaacgtttaggtggagaaaattacgtattatggggtggacgtgagggatatgaaactttattgaataccgatttgaaacgtgaacgtgaacaaattggtcgttttatgcaaatggtggtagaacataagcataaaattgggtttaaaggtacattattaattgagccaaaaccgcaagaaccaactaaacatcaatatgattatgatgtggcaacagtgtatggtttcctaaaacaatttggtttagaaaaagaaattaaagttaatattgaagctaaccacgcgacgcttgctggccatacctttcaacatgaaattgcaacagcttgtgcattagatatttttggctcaattgatgctaatcgtggcgatccacaattaggctgggataccgaccaattcccaaatagtgttgaagaaaatacgttagttatgtatgaaattttaaaacatggtggttttactactggaggttttaattttgatgcgaaaattcgccgacaaagtattgatccttatgatttattttacgctcatatcggtgcaattgatgtattggcattatccttaaaacgtgcagcaaaaatgttacaagaggaaaccttacaaaaaattgttaatgaacgctatgcaggttggaatagtgaacttggtcagcatattttgcaaggcaaaacttcacttgaaacacttgcgcaacttgtccaacaaaaagatttagcgccaaaaccagtttcaggtcagcaagaatatttggaaaatttggtaaaccaagttatttatagctaaaaatgaagcaaaagtgcggttgtattccaccgcacttttttattttaggagacattatgtatataggaattgattgtggcacacaaggaacaaaggcaatagtgcttgattctgtccaaaaaaaagtgattggagttggttacgcaaaacatgaattaattacacaatccaatggaagacgtgaacaacaaccaaattggtggattgaggcattacaacaagcattacaaattgcattgaaacaagcaaaaaattcaccgcacttttcacctaatttagtgaagggaataggcatttcagggcaacaacatggactggtaatgttagataaaaacgatcgtcctctatataaggctaagctttggtgtgatacagaaaccgctacggaaaatgatatactgatcgaaaaattaggcgggcaaacagccgtatttgaaaaattaggtatcatttgccaaactggttacacggcttcaaaactaagttggtttcgtcaaaattatcctgacaaatttgccaatattcgcaaaatcatgctgccacacgattatctaaattattggctaacaggaaaattctgcactgaatttggtgatgcttctggtagtggttatttcgatgttgtgaaaagagaatggaaaagagaagtcttcaaatatcttgcgccagaattaaatatggatgaagtgttaccaaaattactttctgctgaacaaaaaatcggtgtgattaaacctgaaattgcgactttatttggttttaatgagaatgtcatcgtctccacaggtggaggcgataatatgatgggagcaattggtacaggaaatattcgagaagggattgctacgatgagtctcggtacttctggtaccttgtatgcttatacgcaaaagccattacttaatttaccaccaatgatcgcaaatttttgttcaagtaataatggctggttaccactggtttgtgtgatgaatataacctcctcaaataaacagctaatgaatttgctcaatattgatattgaagaattaaatcaacttgctcaacaagcacctattggcgcgaatggcatcactattttgccattctttaatggtgaaagagttccacctttacccaatacaaaagcgagcattttaggattagattcaagtaatttcacacgagaaaatctttgtcgagcaatgatggaaagtgctacttttacgcttcgctatggcttagatttatttcgtcaagctggcctcgaaacctcacaaattcgcctaattggaggtggcgcgaaaagctcattttggcggcaaatgattgctgatgtgatgaattctgaagtggtatgtttgcaggaagaagaagctgctgcattaggaggagcaattcaagctatgtgggcaaatggagaaggagaactggaatttttatgcgaaaccttcattcacttagatgaaaactcaaaagcttatcccaacttatcacaggtgaaaaattatcaaagtgcttatgagcgttatttaacacatttatcacaattatattaaataaaatcccctatgccgataagctataggggatttactacattaataatttattttctattcaaccacgccatatattcagccacgccttccgcgactgttttgaatggtttatcgtagcctgttgagcgaagtttagttaaatctgcttgagtatattcttgataacgagatttcaaatgctctgggaatggaatggtttcaatctcgccttttccgtggaatttcactaccgcatcagccaccgcacggaaactttctgcatttcctgtaccaaggttgtaaatacccgaaataccattttgccaacaccaaatattcactgcagccacatcacccacataaacaaaatcacgacggaagtgttcgctgcctgcaaataattttggattttcgccttttaagatttggttattcaagtggaatgctacactcgccatagaacctttatgattttcacgcggcccgtaaacattgaaataacggaaaccacatactggcgattttgcttctggcaaaatgttacgcacatattgatcgaacaagaatttagaatagccatacacatttaatgggccttcaaattcacgttcttcacggaatactttggtgtctccataagttgccgcacttgaggcatagaaaaaaggaatttcgcgatcaaggcaatagtgcaataactctttagaatattcgtagttgttgtgcataatgtatttgccatcccattccgtagtcgcagaacaagccccctcgtggaataccgcatcaatatcgccaaattcatcgtccgaaataatagaagcaatgaaatcttctttatcacaataatctgcaatgtctaaatcaactaaatttgcaaatttcgtgccatcttttaagttatcgaccactaaaatatctttgcgtcctaaatcattcaatgctttgacaatattgctgccaataaaaccagcaccgcctgttacgataatcataattctgtcctctttaaaataagtctgcgtattgtaatagattttctaccgcttagccaaaaaactctgcgaaaaacaaccgcacttttaatccccaataactcgtaaggccggtcgtaacaagatccattttgcctttactcaacaacacaattgtgggtgtcacattaatttgccatcgttctgcaaattcccctttaggatcattaaccgtagtgaagtggtagtcatgcttacttaaataatcatttacgtccgcctcattgcctgaacgtaatgccaccgatacaacttgatagccttcgtttgctaaagaattaattgctggcgaagtataacgacaataaccacaccaagttccccaaaaataaagtaatgtgggtttgttttgatcaagactttcaagagagaacgtattcccttgaagatcttgtaacgtgattttatttatttcctctggcactacagggcgacgaacaaaatccagtatgctagttatcacaataaaagttaaaaagagggataatccattcttgagtaattttttaatcttcattttatttattccttatcttgttgagatgattgtaattgagcgtaaaaccatagtcaaaaataaagaatttttgctacaataggtaaaacataaataaaaggaggaaaataatgacatcaaatcaacttgctcaatatatcgatcacaccgcacttaccgcagaaaaaaatgaacaagatatttcgacactctgtaatgaagcgattgaacacggattttattctgtatgtatcaattcaggttatattccactcgctaaagaaaaacttgctggctcaaatgtaaaaatttgtaccgtagttggcttccctttgggggcgaatttaacctcaatcaaagcatttgaaacgcaagaatctattaaagcgggtgcaaatgagattgatatggtaattaatgtaggttggataaaatcgcaaaaatggaatgcagtaaaacaagatattcaagctgtatttaatgcttgtaatggcacgccattaaaagtgattttagaaacttgtttgctcactaaagatgaaatagtgaaagcctgtgaaatttgtaaagaaatcggcgtggcttttgttaaaacatcaacgggtttcaataaaggcggcgcagctgtagaagatgttgcattgatgaaacaaacggtcggcaatattggtgttaaagcatcaggtggtgtgcgtgatactgaaactgcacttgcaatgattaaggcgggtgcgactcgcattggtgcaagcgctggcattgcaattattagcggtactcaagacactcaaagcacttactaatcctttcacgcgtggtattctttccacgcgtttttacatattcgacaatttctgcagcaaacgatccattgctcgatagcccaaggcctccgctaagtgcggttgagaaatttgttgttctccttgcagatcagcaatggttcgagaaactttcaaaatacgatgataagcccgaacagaaagccccagtttattcagcgcattttcaaggaaaaaggcatctttatcacttaacttgcaatcacgctcaatctctttactattcaaataagcgttaatttttcccgctctttccatttgaatctcacgcacttttaacactttttcacgtacttgtgcgctagtttcaccacgatcgcccgtattttgtaagctgccttgtggcaataaaggcacttcaatagacaaatcaaaacgatctaaaaatggccctgaaagtcgattcaaataacgcataatttgctggggtgaagtgcggttatgtgttccagtataatgacctgtggggcttggattcatcgctgcgactaattgaaaacgagctggaaattgaattttggcattggcacgagaaataataatctcaccactttccaaaggctgacgtagtgcatctaacacttttcgctcaaattctggaagttcatcaagaaaaagtaccccatttgttgctaaggatatttcgccaggtttagggatcgtcccaccaccaactaaagctggcattgatgcactatgatgtggtgcgcgaaaaggacgttgcttccaattatgaaaatttaactcgttttgaactaaactcgttacagatgctgtttctatcgcttctaaatctgtcatctcaggcaaaagccctgtcaaacggctggctaacatggttttccctgtacccggtgggccaagaaagagcaaattatgctgccccgctgcggcaatggtcaatgctcgtttagcgtgctgttgtccgataatatccgttaaatctaacgtatttttacctgaaaaatttaccgcactttctttcacaatttcagtggcgagtggtaatttttcctgaccattgagaaattgcactacatctaaaagcgtttgagcaaaataagtattttgatcagacacgagcgaggcttcattagcattttgtttcgcaataattaactctcgctttgacttttgtgctgcaagaatagcggggatcacaccatgtacgccacgcaattgtcccgttagcgcaagctcagccacaaattcaaattgctttaagtggctcgcatcaagctgatccgatgcagctaaaatcccgatagcaataggcaaatcaaatcttccgccttctttcggtaaatccgcaggggcgagattcactgtgatacgcttggctgggtatttaaattgtgcattcatcaacgcactacgcacccgatcttgtgcctctttcacggttttttctggcaaaccaacaagtgtaaatcctggttttccgttgcttaaatgcacctcaatagtgactagcggtgcttgcacacccatagaagcacggctgtaaacaatagcaagggacatgataatccttaaagtgcggtaaaaatgaagatagtttttgcactataaaaaaagcacgtaatgaaatcattcattccgtgctttttttgcgatctagatcgcaaaattcatattttatttcgcaaaaagtggcgaaaaccaaaaatctaatttcgccgccaatttatcaataccaattttattttgtgcagaaaaagcctcaacttgtatatcgccttgaaatggaagaattgcttcacgcaccatttttacttgtttactacgtgcactttggctcaatttatcggctttagtaagtaataaaagtaccggtaaatttgctgaaaccgcccattcaatcatttgttggtcaagatctttaagcggatggcgaatatccatcaacacaactaaccctgccaaacattcgcgtttttgtaaatattcgcctaaggatttttgccattgaattttcatctgctctggcacggcagcataaccatagcccggtaaatccaccaatttacaatttggttccacttcaaataagttgattagttgagtacgccctggcgtttttgaggtgcgagctaagcttttttgattggttaatgcattaagtgcagttgattttcctgcatttgaacgacccgcaaacgcaatttcaatgcccgtatcttcaggaatggaacgaatattcggcgcgctcgttaaaaagtgagttttgtggtaattaagtttaatttcagacataagtattccttttaaaaattgtgtttagaatagcataaatggaaaatttcctgaaattatgtcaaaattctctctgaaattataatcaattaatggcaatccagatgacaacaaaaacaacttaccaatggcctcaatctaaggatatttatccatatcgaccagggcgttttgatgcaccaaaacattggcgttataacttacgtagctttttaaatcgtggttcaattcgtcgctttgaacaatttatcaatcaacatccttttctcgtcgatatttttaatacgcacttggattatagttatcctgttgcttgtcgttttttagataagcgttttaacgcatcacaacgttttcatgccgtttgtgagaatcttttatttttacccgaaaaacttaccgcactttctacgccgttatgggaaaaacctctaagttttggcgaagtcattcctgattttgaaatgacattaagcatgacaacccatcaaccgatggaggggtattgggtattggagctatggcataaaccaagaaatgaattagtttatttgcttacttttgccaaattaggcgatgcgttgcttattgctgttgtacaagggccaaattttgaaggctcaaaggaaatggtgaaacaactaaccaaattatgccacggtttacgccctgcctatttaatggttgaaaccatgaaatcactcacaaaaatactagactacgataaattgcttggcattccgcaaaaataccaaaataaatctcgcttcattcaaagtaaacaatacacagtggactatgatgcaatttttggcgaatcaggcggagaattaaaagattactgggaattgcctttagaaatggatagaaatctggatgatattccaagtaaaaaacgttccatgtatcgtaaacgttatgcgatgctagatgatttggctaaggtaattgaagaaaagttaggattgtaaaagtaaaaagtgcggtgaattttaaccgcactttttgttttataagactttcaagcaagccacaaaatggctgttgttttggctggtgaaaggtggtttttgtttcgcacaattctcatcagcctttagacagcgagtacgaaatacgcaaccagacggtggattaattggcgaaggcaaatcaccttcaagtaattcgatggatttattgcgttccaattttggatcggggatcggaacagcagacattaaggctttggtataaggatgtttggtatcgttatatacttccacatcgctgcctaattccattgcattgcctaaatacatcactaatacgcggtcagaaatatgttttaccaccgctaaatcatgggcgataaaaattaaggaaagccccatttctttttgcagggatttcaataaattcaccacttgagcctgaatcgacacatctaacgctgaaacgggctcatcacaaatgatcattttgggctcaatgattaacgcacgagcaataccgatacgctgacattgaccaccagaaaattcatgtgggtagcggttaatcaagttcggtaaaagcccaactttcaacatcatagcttgcactttttctttcacttcggcggcacttaagtgcggttggtagatctttaatggctcagcaatgatttcgccaatattcattcgcggattgagagaggcgagcggatcttggaaaatcatttgaatatctttacgcgtttctttccattgtttcgctgattgttttcgtaaatgtttaccaagccacaagatttccccttcactcgcttcgactaaaccgataatagcgcgtgcaagtgtggatttaccacaaccagattcacctactacgccgagagtttcacctgcgtaaagtttaaaagacacatccttcaccgcttttaaggtttgcggtttggcgaagaaaagggatttatcatttttaattttaaaactgacgcctaagtgattgacttcaaggagtaattctttgttgtttgagactgtcataggttaaatttctccgctgataaccaacaattacgtaattgaccgtgattaaatgtagtcagttttggcgcaatttggcattgttcggtagcaaattggcaacgaggtgagaatggacaaccttttggcaaatgcaataaattcggtggattgccaggaatggtgaccaagtgttcttcattgccgtctaagcgaggaatcgcatccattaagcctatggaatagggatgggttggatgatagaaaatttgttccgctgtgccgtattccatggttcgtccagcatacatcaccatgacttgatcgcagataccagccactaccccaagatcatgggtaatcataataatcgcagtattaaattcgtgttttaactcatttaacaaggtcatgatttgtgcttgaacggtcacatccaaagcggttgttggttcatctgcaatgagtagtttgggacggcataatagggccatcgcaatcatcacccgttgacgcataccgccagaaaactcgtgcggatacatgcccatgcgttttttagcttctggcattttaactgcgtctaacattttcacggattcggcaaaggcagtttgtttatcatagcccttgtgcaattgcagcacttccatgagttgttcaccgattttcatgtatgggttgagtgacgtcattggatcttggaaaatcatggaaatttgctcggcgcggattttattcaattcagcattcggtaaattaactaattctttcccttcaaaaatggcagagccttccacttcaccgttggctgccaataaacccattaaagcaaaggctgtttgtgacttgcctgatccactttcgcctacaatgcccagcgtgcttcctgcattcagcgtgaagtttaagtcattcactgctgtaacgacgccatctggtgttttgaagcgaacgtagagattttttacatctaataaaggattcattattcgctcctatctatctttcggatcgagcgcatcacgcaacccgtcaccgataaagttaaaacaaaatagggtaaggcaaaggaaaaatgccgggaaaattaataaccaaggcgacacttccatttgtgcagcaccatcacttaagagtgcgccccaactactcatcggctcttgtgtacctaatcctaagaagcttaagaatgattcaaatagaatgagcccaggcacttcaagcgaggcataaactgccactaagcctaatacattcggaataatgtgtttcaaaatgatttggcgacgaggtacgccacaaacgatggcggcttcgacgaattctttattttttaggctgagggtttgtccgcgtacaatacgtgcaagaccaagccaggcaatggccccgatagcgataaaaattaagaaaatgttttggccaaaaagggtcaccaacaaaatcacgaaaaacataaatggaaatgagctaagaatttccaaaaagcgcatcatcagcatatctgttttaccgcctacataaccggaaatagccccataaattgtgccgatagtcacggaaatgaaagcaccagcaataccgaccaataatgaaatacgtccaccgatagcagtacgtaccaacaagtctcgacctgaggcatcggtaccgaagaagtgatagccttccattgttggtgcggcgctcatcatattccaatcggtatcttcataggtaaatgggaagaaccaaggcgctacggtgataaatataataataaacgccaaaataatcagactgacaacggccgctttgttgcggaaaaaacggcgtttcgcatcttgccataggctgcggccttccagttgcatttcttcaatacggtcagccacttgttccacaaaatccgcatttttctgattaatcggctgagtacgataatctgtcataacttatccttaataacgaatttttggatcgatgatggcgtataaaatatccacaatcgcattaaataaaatggttaatgtccccactaaaatggtgaggctcaaaactaaagagtaatcgcggttcaatgcgccgtttacaaataataatcccatgccaggtaaaccaaatacgctttcgatgaccattgagccggtaataatccctacgaaagcaggtcctaaataggttatcacgggtaaaagtgcgggacgcaaagcatgttttaaaatgattctcgacatggaaagtcctttagctttggcggttcgaataaagttggaatgtaacacttcaatcatcgaaccacgcatgatacgcgcaatccctgcaacataagcgatagttaaggaggctacaggtaagatcatgtatatggcggtaccgccgttccaaccgccagctggcagccatcctagataaatggcgaaaattagcactaaaataggtgcaaatacgaagcttggcataatgaccccaagcatcgagaaactcatcaaaatataatcccaacggctattttgattcagagcggcgagcgtacctgctgttactcctagcacgactgcaaaggcgaaggccaccatgcccaattttatggaaacagggaaagctgacgcgattaaatcattgactgattggtctttatatttaaaagagggaccaaaatctcctttggaaagattttctaaataaaggaaatattgtttatataatggttcatttaaatgatacttcgcttcgatattagccatgacttctggcggataagcgcgttcagaagtgaaggggctgccaggggcgagacgcatcaaaaagaaagaaaaagtaatcaaaataaacagcgtcggcaaggcttccaacagccgtttaaaaataaacttgaacataacaactccaaccaaaatgggcgaaaagtgcggtcaaaaaatacgacgatttttaaccgcacttaaatacgagcaacgaattaatgtttaataatataaagattgcgtaagtaaatatgatcttgtggatctttgcctgaataaccttttacgtaaggtttcactaagcgtggattcacatagttaaagattggtacgataccgtaatcttttgcaagaatttcttcggctttcgcataagcttttgcacgaccctctgcatcagttgctgcgtaagattctgccatcgctttatcatattctggatttgcgtatttcgcagtattgttactagaattagataagaaatagttgccgaatgttgttgcttggttgtaatccgcactccatcctgcgcgtgccgcatcgtaacgacctgcacgacggctatcaatgtaagttttccactcttggttttctaatttcacatcaatcaaacctttggtgttcgctttccacatagatgctgcagcaatagccacttttttatggttttcattggtattataaagaatgctgaatttcaacggattcgctttactgtaaccagcttcttctaagagtttaatggcttcttcattacgttgtgccatcggttcttttgaataagcaggttgttgaatgagatggccttcttcgatgtaagttggagtaaacacataggttggtgtttgaccttggcccaatactttatcggtgatcacattacgatcaagggataagttcaaggctttacgaatattcacgttatcaaaaggtgctttcttattgtttaattcataagaataagttcctagggtacgagtaacgtatacttcgcctggcaattctttttgtaatttagcgaattgttctggcggtaaaccataactggtcatgtctaaatcgcccgcacgataacgcgctacatcggtacttgggttttcaatggcgaggaatgtcgcgctattgattacggtttctttatcgttccaataaagtgggttacgttcaaattcgattttttcgttaatgatgtggttagccaacttataagcaccgttacccacgtagttttcttttttcacccatgcatcacccaatttttcgactactttttgtggtaatggcaataaggattggtgagtcgttaaactgactgcataaggcacaggattgattgcatgaaccacaaaggtgtaatcatcttttgcttccacgcctaattcagccggttttttcttaccgtcaataatgtcttgcgcattttcaacttgtaaataacttaagtaactcgcataaggtgcagcagtggcaggatccactaagcgacgccacgcaaacacgaaatcgtgtgcagtaacaggatctccgtttgaccatttagcatctttacgtaaatggaatgtccaggttttgaagtcaggtgtattttcccagctttcagccacacccggttgaagtttaccttcagagtctgaggtgactaagccttcaagtaattgataagcaacgttagattctggcacaccttcggttttgtgtgggtcaaaactttgtggttcagccccattattgatgacgatatgctgtttttcatctaattgtgttccttcaggcactataactgcttgcgcagaataggaaagagcaagagcgattgcagagaagagtagtttgtgttgcatttgagcctccttgtcattaggcgatatttttataaaaagtcttctacttattagctcaaaaattcatttttgtaaagatttgtcaggaaattatttgaagaaaaattgagttttgtgagttgtgtctaataaatcgctaaaaaaattgctaaaagtgatgatatgagagggggggatctaggatgtattgatttttcctattgtaaatattttcctacataaattacccttttaatgctaattgtgctatcgtaacctgattagatttaaacaagtccattcaaggagaatacaatgacaacacagttagattcacttcgtaatatgaccgtcgtcgtagctgatactggcgatattgatgcaatcaaaaaataccaaccacaagatgcaacaacaaacccatctttaattttaagtgcttcagaattaccacaatacgccccattaattgatgaagcggtagcttatgcaaaagctcaaagtgcagacaaagcacaacaattaattgatgctgaagataaattagcggtaaacatcggcttagaaattttaaaaattgttccaggacgcatttcaactgaagtggatgcgcgtctttcttacaacacacaagcaacggttgaaaaagcgcgtaaattaatcgcactttataatgcagcaggcatttcaaatgatcgtattttgattaaaatcgcttccacatggcaaggtatccgannnnncattccattcattaattaattaatgaatgaatgnnnnnttcgccatttgtaggtcgtattttagactggtacaaagcaaactccgacaaaaaagaatatgcgccagcagaagatccaggcgttatttcggtcaccaaaatctacaattactacaaagaatatggctacaacacagttgtgatgggcgcaagtttccgtaatgtaggcgaaattactgaacttgcaggttgcgatcgcttaaccattgcaccagcattactgaaagaattacaagaaaattcaaccgcacttgtacgcaaattagaatacaaaggcgaagtaaaagcgaaaccacaaccattaacagaagctgagttctactggcaacataacagcgatgctatggctgttgaaaaattagcagagggtattcgtaaatttgctgttgaccaagaaaaattggaaaccatgctttcagcaaaactttaatctataattcaatataaaaaataaccgcacttcaatttgctcttgaattagttaaagaaaatatttaactaatttgagtgcagattttttatttattaagatataaaagtgcggtaaaaattcggtgtgtttttgtttatttactcctagcagcaatagataatggttacagaaatattattaagtaatacattattcataataaaatagatgaaatttattataaaaatattttaataaagataaattatatttttaatttatactaaattagtagttagaattttaacttgcgataatatcagagaaaagtggtagtcttcccaatattttatacattctggaatgattaccatttgatatatgattataaattagcttaataaatcacttaatttcttaattaagataatttttctttcctcaaagaattgagcaaaattaccaatagataagttcacatcaggtataaagatggttgtcgagaaaagaggttatattagattttgtatttttatttacccattcttcaagagaagcatcttttttcgatgtattttcatcaagccattgtaagttataaatagaattataatttttatcagctttttgagttaatagtaactccttaataaatttatcattgatagattaatttaccatccagcttgtgactgcgataaaaattgcaaagatgcaaaaccaaattatgtggagttttgtgcttttacgattgacttcttcattatgtaaacgtcgagcttctaatctttgtttgtacatctctagatctttttgtttgaaagagaagccgcaattagggcaattttttgcattttcactaatcttttttctgcattcagggcatcttgttaaggacatatttgcttttatacctattcaattacttatttattagcattttaatggatgttttagattttacaaatgtgatacaagtcacaaatcttataaaaatctttaaattcaattttgatttgacgtaatttgaaatagaatacagccgcttgtttagggcatataaatacttttactttattttttgaggagccttcctatgttatggtttttcttttgtgtagccgtgttgattatcggttactttatttatggaaaaattatcgaaaaaatttttgtgattaatccaaaacgtcaaacacctgcttaccaagtaaatgatggtgtggactatatgccaatgtctaaaacgaaaatttggctaattcaattgttaaatattgcgggaacaggccctatttttggccctattcttggtgcattatatggacctgttgcaatgctttggattgttattggttgtatttttgctggcgcagtacacgattatttctgtggtatgttaagtattcgtcacggtggcgcaacaatgccatatttggcgggtaagtttttaggtcgtcccgttaaagtctttatcaatacattagcacttgtgttgcttttacttgtcggtgttgtgtttgtggcaagcccagctcaattgatgggtaccattacaatggatgtatttggtgtttcgcaaggtgcgttagtgcttggtgatgcagaggcagttcatcattctgttgaagctggtgggattaaagtatggggaatggataaagcaacagtggttgctctgtggacagcaattatttttgcttattatattcttgcaaccttacttccagttgataagattattggtcgaatttatccactctttggtgcgttattactctttatgtcagttggtatggtatacggattagttgtttcacattttagtgcaacagatccaattgagtttttccgtacaatcaatgctgatggcgagggtttaacttgggcgaaatttacacaaaatttccaagtgaaaggtgatgttccaatttggccacttttattcttaactatctcttgtggcgcattatcaggtttccacgcaacgcaaactccattaatggcgcgttgtacagaaaatgaaagtgaaggtcgcttcattttctacggtgcaatgattactgagggggtaattgcattagtatggtgtatggttggtcttgcattctatgaaaatccacaagcgttacaagatgcaatttcagcaggttctccatctaaagttgtgtatgatagttcgttacatttcttaggttttattggtggtatttttgccatattaggcgtgattgttcttcctattacttctggcgatactgcattccgtgctgcgcgtttacagatagccgaaatttttaatgttgatcaacgttcattacctaaacgtttattaattgctgtgccgttgtttgtattaggttattttatttcaaccattgatttcagcgtattatggcgttatttcacttgggcaaaccaaatgacagcaatggtaatgttatggactgcagcgggatatttatatcgttatcataaattccactgggttgcgtctcttcctgcgtggtttatcacaacagtatgtgcaacttatttgttctacaacaaaattggtttcggcttagattatcagctttctgtgtatcttggtttagcaacaaccatcgtttgtatcgtattgttcttcacaatgcttaaaccattaggtgcgcgagatgaagaagcttatataaataattagtcaataaaatttgatgaaaaaagccgtttgaattgtttattcaaacggcttttttattttgataaaaatcagttgctttaatgtggaattacttgcaagttgagcgaacaaattataaacttgctagaagtggagaaaagtggtgttttgtggagatttttagagattttctaaaaataagttcaatttttaaggtgtaatatgtttcgtggtgcaacggcggttaatttagattctaagggacgtgtagcgatcccaactcgctatcgcgctgaaattcttgaaaagaaccaagggcaaatggtttgtactgtagatattcgccaatcctgtcttttactttatccccttgatgaatgggaaaaaatcgaacaaaaacttctcgcactttctaactttgatcctacccaacgccgtttgcagcgagtaatgcttggccatgccactgaatgtgagatggatgctcagggtcgtattttgcttagtgggccattacgccaacacgcaaaattagaaaaaggtttaatgttggtagggcaacttaataaatttgaaatttggagcgatgtagaatggcatactcaaattgcagaggatatagaaattggctccagcgcagattttgctgctgatgcgttaaatgatttctcattatagaaaataatgtagtacttttatcttaaatttatgaatagcgaaaattccttttcttcatctgaacatattacagttttacttcacgaagccgtgaatggcttggcattgaaggagaatggcatttatattgatggtacttttgggcgtggggggcattctcggtttatcctttctcaactttcttctaatggtcgtttgatagctgtagatcgcgatcctcgtgctattgcagaagcacacaaaatacaagactcgcgttttcagattgaacataacagcttttcgcatattcctgaaatttgtgacaaattaaatttagtgggcaaaattgacggtattttgcttgatcttggtgtatcttcccctcagcttgatgaagcagaacgtggttttagttttatgaaagatggcccgcttgatatgcgtatggatacaactcaaggtttatctgctgaagaatggttaaaacaagtgtccattgaggatttaacttgggtgttgaaaacttttggcgaagagcgtttcgctaaacgtattgccactgctattgttgatttcaataaaagtgcggtaaaaaatggcacagaatttttatcacgtaccagtcaattggcggaacttatttcacaggcagttccttttaaagataaacataaacatcctgcgacgcgtagtttccaagctattcgtatttttattaattcggaattagatgaattagaaagtctgcttaattctgcgttagatatgttagcaccagaaggtcgtttatcaattattagtttccattctttagaagatagaatggtgaaacattttatgaaaaaacaaagtaagggcgaggatattcccaaaggtttaccattgcgagaagatcaaattcagcgtaatcaaaaattaagaattattggtaaagccattcagccaagtgatgcagaaattcaagcaaatcctcgttcaagaagtgccatattacgtgtggcagagagaatttagcgatgtctgaaaataataagcctcgttatccgttacagcagattttagtcgaagatttattttcttcaaataagttagtggtgttgctgttaatagggattttagtttctgcaatgggaacgatttggataacccataaaactcgccaattaatttctgaaaatggaatgttaattttacagcgtcaagcacttgagaatgaataccgtaatttacaagtgcaggaagctacggaaggggatagcacgcgtgtagaatctattgcgattagtacattaaaaatgaaagttgtttcttcagagcaagaagttgaaattagagaataataggtaaaaaaatggtgaaatttaattcctcgcgtaaatcaggtaagtcaaaaaaaacaattagaaaattgaccgcacctgaaactgtaaagcaaaacaagtctcaaaaggtgtttgaaaaatgctttatgcgtggacgttatatgctttctacggttcttattttactcggtctgtgtgctttagtcgcacgagcagcttatgttcaatctattaatgccgatacgttatcaaatgaagcggataagcgttctttgcgtaaagatgaagtattatcggtgcgtggttctattttagatcgtaatggtcagcttttatctgtaagcgtgccgatgagcgcgattgtggcagatccaaaaacgatgttgaaggaaaattcgcttgcggataaagaacgaattgcagctttagccgaagaattaggtatgactaaaaatgatttagtgaaaaaaattgagaaaaattctaaatctggttatttgtatttagcacgtcaagttgaattaagtaaagctaactatattcgtaaattaaaaattaagggtattattttagaaacagagcatcgccgtttttatcctcgtgtagaagaagctgcacacgtggtgggttatacggatattgatggaaatggtattgaaggcattgagaaaagttttaattccctgcttgttggtaaagacggttcacgtactgttcgtaaagataaacgaggaaatattgttgaacatatctccgatgagaaaaaatatgatgcacaagatgttaccttaagtatcgatgaaaaattgcaatctatggtgtatcgtgagattaaaaaggcggtgtctgagaataatgcagaatctggtactgcggtgttagttgatgttcgtactggggaagtgttagctatggcgactgcgccctcttataatccaaacaaccgtgtcggcgtgaaatcagagttaatgcgtaaccgtgcaattaccgatacttttgagccaggttctacggtaaaacctttcgttgttttaaccgcacttcaacgaggtgtcgttaaacgagatgaaattattgatactacgtcctttaaattaagcggtaaagaaattgtggacgtagcaccacgtgctcagcaaactttagacgagattttaatgaactctagtaaccgtggtgtaagtcgtcttgcactacgtatgccacctagtgcattaatggaaacttatcaaaatgcaggtttaagtaaaccgacagatttaggcttgatcggagaacaagttgggattttgaatgcaaatcgtaaacgctgggcagatattgagcgtgcaacagtcgcttatggttatggtattactgcgacacctttacaaattgctcgtgcctatgcaacccttggtagtttcggtgtttatcgtccgctttctatcactaaagttgatccgccagttattgggaaacgggttttctctgaaaaaataactaaagatattgtgggaattttagagaaagtagcaattaaaaataaacgcgcaatggtggaaggctaccgtgtcggcgtaaaaacaggtacggcacgtaagattgaaaatggacattatgtaaataagtatgtggcatttactgcgggtattgcaccaattagtgatcctcgttatgcattagtggttttgatcaatgatccaaaagcaggagaatattatggtggtgcggtttctgcccctgtattctctaacattatgggctatgcgttacgtgcaaatgctattccgcaagatgctgaagcagctgaaaacacaacaacgaaaagtgcaaaacgtattgtttatattggcgaacacaagaatcaaaaagtgaattaaggaaaaattatgaaaaaactcaccgcactttttaatttgcctgaattaaagaatgatatagaactccataatatggtgttagatagccgtaaggttaaagctggcgatctttttgtggcgataaaaggtcatcaggtggatggaaatcaatttattgattctgctcttcattctggtgcgagtgcggtggtttctgagacagaattatctagcgagcatttaactgtagagtttattgggaatgttcccgtagtgaaatatcatcaactttcacgtcatctttcgtccttagctgatgttttttatgattcgccctctaaaaatttaacccttgttggtgttacaggaacaaatggcaaaaccactatttctcaattattagcgcaatgggtggaattattggggcatcgtgcggctgtgatgggaaccattggtaatggactttttgggcaaattgtagaagctaaaaatacgacaggttcagcagtagaaattcagtcatctctttcaactttcaaacacgcaggtgcagattttacctctattgaagtttcatcacacggtttggcgcagcatcgtgtagaagccttgcattttaaagcagcaattttcacaaatttaacccgtgatcatctagattatcatcaatctatggaaaattatgctgcagcgaagaaacgcttgttcactgaattagatacccaaattaaagtgattaatgctgatgatgaaattggataccaatggctaactgaactacctgatgctattgccgtaagtatgaatgcggattttaaagtaggttcacaccaatggatgaaagcaataaatatccattatcattttaaaggtgcagatattacttttgaatctagctggggtaatggtgttttgcatagcccattaattggtgcttttaatgtaagtaatttattattagtaataaccacgttgttatcgtttggttacccattggaaaatttactcgctacggcgaaatctttaaaaggagtatgtggaagaatggaaatgattcaatatccaaataaaccaaccgttattgtagattatgcgcatacaccagatgcgttagaaaaagcgttgattgctgcgcgtgaacattgccaaggcgaattatggtgcatttttggttgtggcggagaccgtgatagaggcaaacgtccgttaatggcacaggttgcagagcagtttgctgaaaagattattgtgacaaaagataatccacgaacagaaccacaaagccaaattgaagcagatattgtcgctggctttaaaaatatggaaaaagtggggattattcctgatcgcgcacaggcaatccagtttgcgattgaaagtgcggtagaaaatgacgtgattttaattgctggaaaggggcacgagcattatcaaattattggttcggaagttgtgcatttttccgaccaagaaattgcacttgatttcttaaaataataatcactcaattatgattaaactctctactgtacaacttgcacagattcttcaagctaaattaattggcgatgaaaatgtgcaagttgaagaaattaatacggatactcgaaaaagcgtatcaaatagcttattttttgctttaaaaggcgaaaaatttgatgctcatcaatatcttgatcaagcggtagcacaaggtgcggtagccgttgttgttcagcaagaaaattcttccatttctattcctcagctggtggttaaggatactcgaattgctttaggcgaacttgcaaaatggttacgtgagaaaattaatccacgtactgtggcgatgaccggctcttctggtaaaactacggtaaaagaaatgacagcaagtattttgcagcataccgcagcagattcagaagcggtactttttaccaatggtaacttcaataacgatataggtgtgcctttaactctgcttcgcttaacagaaaaacatcgttttgctgtgattgaacttggtgcaaatcatcaaaatgaaatcaattacaccacaaaattagttcaacctaatgccgcattgattaataatattgcgcccgcacatttagaggggtttggttctttagcgggggttgttcaagcaaaaggcgagatttatcgaggtttaacaaaaaatggtgtggcgattatcaatgctgaacataatcacttagatatttggcaaaaagaaattagtaatcacgccattcaatatttcaacggcaaggactattccgtcaaaaatgttcaaggtaacgaacaaggttcaacctttacgttagtttctccgcaaggcgaaattgatattagtttgccttatcttggagagcataatgtaaaaaatgctttagctgctaccgcactagcgatgaatgttggtgctacgcttgccgatgtcaaagctggattagaacaacgttcacaagtgaaagggcgtttatttcctattcaagtaacgcctaatttattgttattagatgatacttataacgcaaataaagattctctctgtgcggctattgatgtcctaaaaagttatgatgctttccttattctatgtgtcgcagatatgaaagaattgggcgaaaattctctcgctattcatcgtgaagtaggacaatatgttaatttggtaaatttagatttggtgtgttcttatggcaatgaaagtgcggttatttctgaggctgttttgggtaagcattttacggataaaactgaaatggtggatttcttagttccacttattgaaaaccaattacaacaaaataaaaaagttgtggtgctgggaaaaggctcacgctcaatgaaaatggaagatgtgatctattcattaaaggataaaattaaatgttagtctggcttgctgaatatcttgttcgttacgaaaccgcttttaatgctatttcttatattaccgtccgcgcaattcttgcattattaaccgcactttttatctcactttggattggccctaaagtgatcaaacgtttacagatcttaaaatttggccaagaagtgcgaaatgatggccctgaaagtcactttgcaaaaaaaggcacacccactatgggcggtgtgatgattttattctctattggcgtaagtacgttattatgggcaaatcttgctaatccttatatttgggtttgtttatttgttttatttggatacggcgcaattggttttgtggatgatttccgtaaaattacccgtaaaaatacagatggtttaattgctcgttggaaatatttctggatgtctgtggtggcattagtggcaatcctttggctttattggcttggtcacgacactgatgccacccgtttagtgattccattctttaaagacattatgcctcaattaggtttgttctatattgtgttatcttactttgtgattgttggcacgggtaatgcagtgaatttaaccgacggtttagatggattagcgattatgcctactgcgcttgttgcaggtgcgtttgctttaattgcttgggctacaggtaacgtgaatttcgcagaatatttgcacattccgtatattaaatacagttctgaagtagtggtgttctgtacagctattgttggcgcgagtttgggattcttatggtttaatacttatccagctcaagtatttatgggggacgtgggttctctagcattaggtggcgcgctgggtgtcgtagcaattcttgttcgtcaggaatttttgcttgtgataatgggtggcgtatttgttgttgaagcgctctctgttattttgcaagtagggtcttataagttacgcaaacaacgcatttttagaatggcaccgattcatcatcattttgaattgaaaggatggccagaaccaagagtgattattcggttttggattatttccttaatgttagtgttgatgggattagtcaccttgaagttgcgttaataaatgttgtgaggttcgctctttcagtttttgaaagagcgagctttttacgttataaattgatatttccatcagcaaaatttaaaacttatagtaattaagaagaaataaaatgaatgcctatcaaaacaaaaatattacgatcattgggcttggcaaaacaggtctttcttgtgtggattatctcttatcccaacaggctaatattcgtgtgattgatacccgaaaaaatcctactggtattgataaacttcctaaaaatatccctcttcatactggtagtttaaatcaggaatggttacttgaaagcgatatgattgttattagcccaggacttgcggtaaaaacaccagaaattcaaaccgcacttaaagcgggagtggaagtaataggcgacattgaattattctgccgtgcggcgacaaagccaattgtggggattacaggttcaaatggaaaaagtactgtaacgactttagtttatgaaatggcgaaagctgctggcgtaaaagttggtatgggtggaaatattggcattcccgctttgtcattgttgaatgaagattgtgaactttatgtactcgagctgtctagttttcaacttgaaacaacttacagcttaaaagctgcggctgcaactgttttgaacgtgactgaagatcatatggatcgctatgtggatttagaagattatcgccaagcaaaattacgtatttatcataatgctgaggtcggagttttaaataatgaggataagctgacttttggtgaaggcgaaaatcaagcgaaacaaaccgtttcttttgcggaaaatagtgcagattattggctaaaaacggaaaacggcaagcaatatttaatggcaaaagatgaagtaattttgccttgtgaagaagtaacattagtcggtcgccataattatatgaacattttggcagcaacagcattggcacaagctgtcggtattaatttagatgcaattcgtaccgcactttgtcatttcaaaggattagatcatcgtttccaattagcgcatcaagccaatggtgttcgttggattaatgattctaaagcgacaaatgtaggcagcactgttgctgcattggctgggctttatgttgagggtaaattgcatttgttgctaggtggagacggaaaaggggctgatttttcagaattagctgaattaattaatcagccacagattatttgttattgttttggtcgagatggtgcgcagcttgcaaaactttcatcacaaagccatttgtttgaaacaatggaacaagccatagcatttttacgcccaatattgcaaagcggagatatggtattattgtcgcctgcttgtgcaagtctcgatcagtttgcatcttttgaaaagcgcggcgaagaatttactcgtttagctcaatgttcagcctaatttagtcactcacaaaataagatggaatttttacaaaacatcaaaaaaaattacgatgaatggacacgcatcacacctcaaggtttgttgtatgatcgcgcgctattttggttatttgttattttgcttttaattggtttaattgcagtaacatctgcatctattccttatagctctcgattgtttaatgatcctttttattttgcaaaacgcgatgctatttatgtgctactttctttgctaacttgttatatttcattacatatttcttcttcgcaatgggaaaaatggcacgctaaaattttcttattttccgtcatattattattgcttgttccctttattggtacatcggttaatggtgcaaaacgttggatttcattggggatcttaaactttcaacctgcagaatttgcaaaattagcactcacttgttttttagcaagctattttactcgtcgttatgatgaagtgcggtcacgacatgttagtatttttaaaccgcttattgttatgcttgtattaggttgttttcttttattacaacctgatttaggtagtacagtcgtgttatttattattatgtcaggaatgctttttatcgtgggggcaaaaattttacagtttgtaggattaatcgctctaggaggcattttattcgtttggcttgtattgacagcttcttatcgcctcaagcgatttacaggttttttagaaccctttaaagatccttatggtacgggatttcaactaacaaattctcttatagcgtttggtcgaggagaaattactggagaaggattaggtaattcaattcaaaaattagattatctgcctgaagcacataccgatttcattatggcgattatcggcgaagaatttggatttatcggtatatttattgttattcttttattaggtttattaatttttcgtgcaatgaaaattggacgagaatccttaatgttagaacaacgttttcgaggtttttttgcattaggtattggtttttggattttctttcaaggctttgttaatttaggtatggcacttggaatgttaccaactaaaggtttaacctttccgctcgtgagttatggtggttcgagtattatcattatgtccgccaccattggtattttattacgaattgatcacgaaaatcgtttatttcgtataggtcaagcacgcttgcgtgatgattagagataaaaaagatgaaaaagaaaaaattattagtgatggcgggtggtactggtggtcatatttttcctgcgattgcggttgctcaaactttgcaaaaacaaggatgggatatttgctggttaggcacgaaagatagaatggaagctcagcttgtaccaaagtatgctattcctattcgatttattcaaatttctggcttgcgtggtaagggcataaaggctttatttaacgcgccttttactattcttcgtgcggtgttgcaggcaaaaaaaattattcaagaagaaaagcctgacgctgtacttggtatggggggctatgtttcgggtcctgctggcgtagcggcaaaactttgtggtgtaccaataattttacatgaacaaaatgcgattgcgggtttaacgaacaaattattaggtaaaattgcaagctgtgtattgcaggcatttccaaccgctttttctaatgctgaagtggtaggaaaccccgtccgagaagatttatttgagatgccaaatcctgatattcgtttctcggatcgtgaggaaaaattacgtgtcttagttgttggtggtagccaaggggcgagagtacttaatcatactttgcccaaagtggtggcgcagcttgcagataaattagagattcgtcatcaagtaggcaaaggtgcggtagaagaagtcagccaactttatggcgagcatcaagagaaagttaaagtcacagaatttattgataatatggcagaggcttatgcttgggctgatgtggtgatttgccgttctggcgcattaaccgtatgtgaaattgcagcagtgggagccgcagcaatttttgtacccttccaacataaagatcgccaacaatatttaaatgcgaaatatttatcagatgttggcgcggcgaaaattatagaacaggcagatttaacgcctgaaattctagtgaattctttaaaaaatttcactcgtgaaaatttattgcagatggcattgaaagcgaaaacaatgtcgatgcctaatgcggcacaacgtgtagctgaagtaattaaacaatattcaaactaggggttgtggcgttttataaatagcctcagtcataagtatttttatatccaaaagtgctaatattagaaataaaaacgttgcgaattttaaccgcacttttagttgagttttgtcattgggagaaaaggaaaaataaatgaaacattcccacgaagaaattagaaaaattatccctgaaatgcgccgtgtacagcaaattcatttcattggcattggtggtgcgggaatgagcggcattgcagaaattttattaaatgaaggttatcaaatttcaggttcagatattgccgatggcgtagtcactcaacgtttagctcaagctggggcaaaaatctacattggtcatgcagaagaacatattgaaggtgccagtgttgttgttgtgtctagtgcgataaaagatgataaccctgaattagtcgcatcgaaacaaaaacgcattccagtgattcaacgcgcacaaatgttggcggagattatgcgttttcgtcacggtattgctgttgcaggaacacacgggaaaacgacaacaacagcaatgatttcaatgatttacacccaagctaaacttgatccgacttttgtaaatggtggtttagtgaaatcggcgggtaagaatgcacatttaggggcaagtcgttatttaattgccgaagccgatgaaagtgatgcgtcgtttttgcatttacagccaatggtatctgttgtaactaatatggagccagaccatatggatacttacgaaggcgattttgaaaaaatgaaagccacttatgtgaaattcctgcataatttaccattctatggtttagccgtgatgtgcgctgatgatcctgttttaatggaacttgtgccaaaagttggtcgccaagtgattacatatggttttagtgagcaggcagattatcgcattgaagattatgaacaaacaggttttcaaggtcattacacagtgatttgcccaaataatgaacgtattaatgtgttgctcaatgttcctggaaaacataatgcattaaatgcaacggctgcacttgctgtagcaaaagaagagggtattgctaacgaggcaattttagaggctctggctgattttcagggggctggtcgtcgctttgatcagttaggtgagtttattcgtccaaatggtaaagtgcgtttagttgatgattatggtcatcatccaacagaagtagacgtaaccattaaagcagcgcgagaaggctggagagataaacgtattgtaatgattttccaaccgcatcgttattcgcgcactcgtgatttgtttgatgattttgtacaagtgctttcgcaagtagacgctttgattatgcttgatgtgtacgcagcgggagaagcccctattgttggcgctgacagtaaatctctttgccgttccattcgtaatcttggtaaagttgatcctattttggtatcagatacttcgcaactaggcgatgttctcgatcaaattattcaagacggcgatttgattttggcacaaggtgcgggtagcgtaagtaaaatttctcgtggcttggctgaatcttggaagaattaatgccagatggattgattgaaaatcttagtattagaaaagtatcatcagtaagaagaaaaacaggatagaaaatgaacttaaaacaagaaaaaatcgcggtgttattaggcggcacatctgctgaacgtgaagtttctttcaattcaggcaaagcggtattagaagcattattaaagcaaggttataatgcacatcctattgatcctaaagaatataatgttgcaaatcttaaaaaggatggctttaatcgagcatttaatattttgcacggtcgtggtggagaagatggcacaatgcaaggtttattagagcaaattggtttgccttatacggggtgtggcgtgatggcttctgcattaacgatggacaaaatgcgtacaaaaatgttgtggaaagcttttggtttacctgttgcagatatgaaagtggttacccgagaaactttttctgaattagatcctcaggctgttgtggcaaaattaggcttaccattaatggttaaaccctctttagaaggctctagcgttggcttaacgaaagtaaaagcggtagaagagttaaaaagtgcggtggaatatgcgcttaaatttgataataccattctaattgaagagtggttagctggcgatgaattaactgtgcctgtgcttgacaatcaagtattacccgcaattcgtattgttccagagggcgaattttatgattatgaagcgaagtatatttctgataatacgcaatatttctgcccagcaggtttaacgcctgaacgcgagcaagcgttatcaacattagtaaaacgtgcttatgatgcagtgggatgtcgtggttggagtcgtattgatgtaatgtgtgatgcaaaaggtaatttccgtttggttgaggttaatactaatcctggaatgacgagccatagtttattcccaaaatctgcagcgacggtaggtatttcttttgagcaactcgtcgtgaaaattttggagttgagcctgtaatgaacattctgaaaagaaaaacgccacagaatattcgttttggagaacaaaagcctaaatattattttcatattcggacttttgcggtattgcttggtgtcttttttttacttggtgtttattttaattggcaaagcattttagaaaaaatggatgataagccgattagcgcatttgcacttgttggacaaaatacctttactactgctgatgatattaaagaaagcctattaaaaatgggcgaattaaaaggattttgggggcaagatgtggcaccgattcaagagcaaattgaggctttaccttgggttaaaggtgcaatcgtaagaaaaatgtggccaaatcgtttaagtatttgggtatcagaatatcaacccgttgcgttttggaatcaaaatcaatttgttacccttgatggtatcgtttttcagcttccttctgtacgtttaactgcaaaaaatttgccctatttgggcgggcccgattatcagagtttgaaagtaattgagacgtggaaccaaatttatattaatttaaaatcaaataatataatggcaaagggaattaatattgatgatcgcggtgcgtggcaggtccagcttgataatgatattgtgctaaaattaggtcgtggcgattggaaatcaaaacttgagcgatttgtcacaatttatccgcaaattgatgtgccagaaaacaaaaagatagattatatagatttaagatatacggcaggtgcagctgtaggtatggttgatagataaaaataactgggtgcgaaaatggttaaaggtgtggaaacaaaaacaatagtaggtttagaggttggcacgtcaaaagtggtcgctgtagttggcgaagtatttcctgatggtgtagtgaatgtgcttggtgtaggcagttgtccttcaaaagggattgatcgtggcagcatcactgatcttgatgccgtggtgggttcgattcaacgtgctattgaagcggcagaatctatggctgattgtcagattatgagtgtgactttagccattactggagagcatattcaaagcctcaatgaaagtggttttgtgccgatagcagaaagtgaagtaacacaagaggaaatcgattccgcacttcatacagcaagctcaataaaattgccagaaggcttatctttattgcatgttattccacaagaatacgctgttgatcgtcagatgaacattaaaaatccattaggattacaaggcgtgcgtttaaaagcacaagtacatttgatcgcttgtcatcaagattggcaaaataacttaaaaaaagccattgaacgttgtggattgcaagtggataaagtggttttctctggttttgcagcaacacattctgtgctaactgaggatgaaaaagatctcggcgtgtgtttaattgattttggtgctggcacaatgaacgtgatggtttatacgaatggcgcattacgttttagcaaggtaattccttacgcaggaaatattgtgacaaatgatattgcgcatgcttgtacaatttcgcgagcagaagcagaacggatcaaagtgaactatgctagtgcattttacccagctcgtttgcacggagataaaaaaattgaagtggcaagtattggcggtcgtgcgcctcgttcattaacaaaaagtgatttatctttaattacatcagctcgttatacggagcttttaggcgtggtaaaagatgaattagataagttaaaagctgaattagaagcaaaacatattaaatttgaattaattgcaggcgtggtaataactggtggtggagcgcagattgaagatcttaaagaatgcgctttaaatgttttccattgtcaggtgcgtattgcgagtccattaaatattactggtttgactgattacgtgaatcgtccacaatattcaacggtggtgggactattgcaatataattacagtaatagtgatgatgatttaatttcaggaagtgatgattctgaaggaactttctttgaatctatttggcaaggagtaaaaaaaattgtcaataaagtacggtcagaattttgattattttaatttttcatctacaataaagggaatttatattttatatatttagtcagcttatctggcagtaacggagaacatcaatgctatacccagagtaccctgagtacgataattttaacgaatccggcgcactgatcaaagtcgtaggtgtaggcggtggcggtggcaatgccgtaaaccatatggtaatgaatatggtaaaacaagaaatgggcggaacctttgttggcgaaagttcattaacatcagaggaacacggtcgcatagtattttatgccgtcaatactgatgctcaagcattgcgtaaaagtcaagttcaacagaccgtacaaattggtggagaaacaaccaaaggtttaggtgctggggcaaatccgaatattggtcgtaaggcagctgaagatgatcaggatgaaatccgcaaaatgcttgaaggtgccgatatggtctttattgcagcaggtatgggcggcggcacaggtacgggtgcggcacctgttgttgctaaaattgctaaagaactgggtattttgactgttgctgtagtgactaaaccttttgcctttgaaggcaaaaaacgtatgcaatttgcagagcttggtattaaagatttatcccaatatgttgattcaatgattattattccgaatcaacaaatccaaaaagttctccctaaaaatgctaaattaattgatgcttttgctgctgcaaacgacgtattgcgtaattctgtaatgggaatttcagatatgattacctctcctggtttaattaacgtggacttcgctgatgtaagaacggtaatgtcagttcaagggcaagctatgattggttttggttcagctgtgggagaacccggtgcaggtagagcagaagaggcagctcgtcttgcagtacgcaatgatcttctagaaaaaatcgatctttctaacgctcaaggaattttagttaatattactgctggaatggatttagtttttgaagagtttaacattataggtgagacaataggtagttttgcttctgaagaagctacagttgttgttggtacgagtttagtgcctgagatgagcgatgaaattcgtgtaactattgtggcaactggtctcggtgaaattgcaggaaatgaaccaattcaggttgttcgtcaagggctttctacgcagaatattgaagaaggtgaaggacgtgtaaacattgttcctgaacttcatcgtcgtgaatctgttgaagtgtcaagaactgcatcagaagaatatcaacggccgttagataaaccgattacagatcgcttggaagcatttaagaaaaataatttctttaatcctgcacagcgtgaagaaaattaataagtttcagaaaatacctagtaaatgaaggtagtagaatgattaaacaaagaacattaaaacaaagtattaaagttacaggcgttggcttgcatagcggtgaaaaagtgacattaaccttgcgcccagctatgccaaacactggtgttgtttattatcgtacagatttaaaccctacggtggcattccctgctgatcctaattcagtgcgtgatacaatgctttgtaccgcactaattaatgaacaaggtgtgcgtatttctaccgtcgagcatttaaatgcagctttggcagggcttggtattgataatattattattgaagttgatgctcctgaaattccaattatggatggtagtgctagtccgtttatctatttgttgttagatgcgggaattgaagaacaaaatgcagcgaaaaaatttattcgtattaaggaatatgttcgagttgaagatggtgataaatgggctgaatttaagccttacaatggtttccgtttagattttactattgattttgaccatcctgctattggcaaagatgtacgtaactatgaaatgaatttttctgcccaagcatttgttcatcaaattagccgagcaagaacttttggctttatgaaagatattgaatatcttcaatctcaaggtttagtattaggtggtagccttgataatgcgattgttcttgatgattatagaattttaaatgaagatggtttacgttttaaagatgaacttgttcgtcataaaatgttagacgcaattggtgatctttatatggctggttataacattatcggtgattttaaagcctataaatcaggtcacggtttaaataacaagttacttcgtgctgttttagcaaatcaagaagcgtgggaatttgtaacctttgaagataaagcgcaagtgccacaagggtatgtagctccagtgcaagtgcttatttaattgttttattgttgaaaaagctatatttctggtgggaagtatagcttttttatttcatctcgtgcttaaatagcgaatgtactaaaagtgcggtcaatttcgtgggattttttataaggaagcattatggcattagaattatctgacattcgccaacaaattacgcaaatagatcgtagtttattaaaattactttctgagcgtcatcgtttagctttcgatgtagtgagaagtaaagagatctcgcaaaaatctttacgtgatgtagagcgagaacagcaacttttacaagaactagtgcaatttgcagaaaatgaaaattatcagcttgaagcacaatatatcacttcaattttccaaaaaatcattgaagactcggtattgacccagcaagtctatttgcaaaataaacttaatgaacaacgtaatcaaaatttacatattgcttttttaggtaagagagggtcttattcaaatttagctgcacgtaattatgctgctcgttatcaaaaacaatttgtagaactaggatgtcagtcttttgagcaagtatttgaaaaagttcagactggagaagctgactttggcgtattgcctttagaaaatacaacatcgggtgcaattaatgaagtttatgatttacttcagcatactgatttatcattagtgggagagttggcatatccaatcaaacattgcgtacttgtcaatgataagacagatttgagtcaaattgatacgttgtatagtcatcctcaagtgattcaacaatgtagtcaatttattcatagtcttgatcgtgtgcatattgaatattgcgaaagcagttcacacgcaatgcaattagtcgcaagtttgaataaacctaatattgcagcattgggtaatgaagatggtggaaaattgtatggacttagtgtattaaaaactaatattgctaatcaagagaacaatattacacgttttattgtggtggctaaagatcctcgcgaagtttcatcacagattcccacaaagaccttattattaatgacaacttcacagcaagctggcgcgttagtggatgctttattcgtgtttaaaaagcatcaaataaatatgacaaaactggaatctcgaccgatttatggtaagccttgggaagaaatgttttatctagaaattgaagcaaatattcatcatccagatacaaaacaggctttggaagaattaaaaggttatagcaattacttaaagattttaggttgttatcctagtgagattgtaaagcctgtgagtgtataaaaaagtgcggtcaataaaaatgatgtttttatgaccgcactttttatatttttttgttccgttctaaggatttatgttgaatttgtaccgtttttcctttggcttgaaaatattcgcctaactgctgtgctatataaacggagcggtgttttcccccagtacatccaatggcaatcgtcaaatagctacggttatttttttctaacatcggcaaccaagtatcaatgtaatgacgagtgagataaataaattcattgacttctgtatgactatttagaaattctgcgacaggggcttctaatccagtcattgggcgtaatgttggatcccaatgggggttaggcaaaaagcggacatcgaaaacataatccgcatctaaaggaatcccatatttaaaaccaaaagattcaacaataatttttaattctttttcactattatcgcgtaaaaattcgcgtaatcgttctgcaagaatatgcgtagaaagatgggtggtatcaagaataagatttgcgtgttgaatcaatggctcaagatagcgatattcttcatctattgcagcttcaagagatagatcttttaatgaaagcgggtgcaaacggcgtgaatcactatatcggcgaatcagggtagcatgatcagcctctaagaaaatgattttaatttgatgatgattttgtaacgttgaaagggtttgctcaagagaattagcggagtttggaatattacgaatatcgagactaatggcgaccgaagattgagattgagacagaatatcagtcaattgaggaagcaaatctaaaggaatattatcaacacagtaatatcctgtatcttctaatgctcgtaaggctacagattttcctgcaccagaacgcccactaataatgataatttccataaatttccccactgtaattattctttcacttcttcaagtgtcgtttctgattgatcggtaatttcaaaaacttgccaaatttcatccgcacttttggctgatcgtaattgtttcaacacatttttatcagtcagtttttctattaatgatgctaaaactggaatgtagctttcacattgattttctggaatcagtaaggcaaagattaagtccactggtttactatcaacagcatcgtaatcaatcggattatcgagttgcataaacactgcgattgctttatctgatactgttacggggatttttgcttttggcattgcaatcccatttcctaaaccagaattccccagtttttcacgttcaaaaagacattcaaaacaggcttgttcgccttgttctgcaagaacttgttctaccacaaaatgtgaaatagattcaaataatcgttttttgctagaaaaactaacgccctgacgaatattctcagggcttaataattcagttattttcatttttataatttgaattgttcgccaagataaacgcgtttaacctgttcatcgttcatcacttgttccggtgtacctgttgcgataattttacctgcgccaacaatataagcgcgttcgcaaacatcaagggtttcacggacattatggtcagtaattaatacacctaatcctcggttacgtaagtcggtgataatttttttaatatcgcttacagaaataggatctacaccagcaaaaggctcgtctaatagaataaattttggatttgccgctaaggcacgtgcgatttctacacggcgacgttcgccgcctgataaggcttgtcctaaattatctcgaatatgagcaatgttaaattcttcaattaattcatctgctttttcacgacgttgttgtggcgttaaatctttacggatttccaataccgccatcaaattttcatacacagtcaaacggcgaaaaatcgaggcttcttgcggtaaataaccaatgccacgttgcgcacggttatgcattgggagcaaactaatgtcttcgccatcaataacaattttgccttgatcttggcgaacaagcccaacgaccatatagaacgtggttgttttacctgcaccgtttggcccgagcaaaccgacaatttcattagaatttacggttaaactgacatccgaaacaactttacgacttttgtagcttttagctaaattctctgcagtcaaaattgacatagattacttccctttagcttgttgtaattgagatggaataagaactgttgttacccgtgattttccattaccattagctttaagttgttgtttcttcacatcataggtaataacactgccattaattttactatcaagctgctttaattcggcattgttagttaatgttaaaaattcgttgccaagatcataatgaactttatttgcttttccatctactggagtgccattatctaactgttgatggaatgtgactggcgtaccgaatgcttctacagtttcttttttccctgatttttcagcgggacgagtgataacaactttatttgctttaatgatgatagatccctgtgtaattactacattatctgtgaatgtcactacacttttttccatatctaaggattgattatccgaaacgatatttatcggctgattaacgtcatctttcaatgcaaaagctgaacttgatgctaataccatcgttgcaagaaaaagaattttattgcttactaacttcataatatgtttttacctgttcctttaatgtcgccacttgttggcgtaaatttccgactaattttaatcctgtagaactaaaatttttacccttaattttaacctgtgtttcggaagtcatatcctgtgtttttaaattgacgaccgctgattctgtttcaatgcgttgcaaacgagaatctgatgttaaactttgcacgacgacattaccctctaaatacaatatttgatcttttgtcaatcttgcttgatttgcacttaatttccagttttgtgtgctaaaaaaatctacattttgattgggattttgttccttttcatttgatgttgtgggatataaataaactaaaggcgcggtaaaaagggtttgttcattgactgtataatgctcaattttatcggataaagccaaatattgttttttaccctcaggggaaaaaaccgttgtttccattttataacccacataatcaggactatctggttttttcacaagttcagataaatctgcggtttcctgatttaaggaataaaaccacgccaaagcacaaagtgcgataacgcccaaaattacattccaacgaatattcattttatttcaatcacttatccacaaagtgcggatgaaaatttcaatgtttttaatcttccaacattaataccttgagcatttgataaatttctcgataggcttttgatggtttattttgttccagttctttttgtgcagaacgaatcagattgcgtagttgctgacgatcgccatcaggataatcatttagtaaatcagttaaagccacatcacctttttccaccaattcatcgcacactttttcgattttgtgcaacatagcttgttgttgattatgcttattttcaattttatctaaggcttcacgaataggttcaacatcaattccacgcaataatttaccgatatattgtaattgacggcggcgagcttctttttgtaaacgctgtgcaagttcaatggcatcaagtaaggattcattaagtggaatttttgccagattgtttttcgtgagattgacaattttttcgccaagttgttttaaatcttccgcatcgcgtttgatttcgcttttactcacccaaataatttcttcttgatcttcatcttcccaatcgaaaacttcttttttcttacgttttgccattttttatcctttatgaaaattggcgtgcattttaccataaactttaaaaataagataaaatgttgaaaatttttaataggaaaaaataatgaaaacagccgaaaattcaaccgcacttttaaaagcacaagaacaagaattacgtcaagccgtcagttttgcagtggcgttagcaacgaaagctggcgcaagtgcagaagttgcggtcacaaaagtgagcggtttatccgtatctgctcgtttgcaagaagttgaaaacgtagaatttactaatgatggcgcattggggatttctgtttatatggggcaacaaaaaggcaatgcctcgacttccgatttaagcgaaagcgcaattaaaaatgcagtggaagccgcacttgctattgcaaaatacacttcacccgatgattgcacaggccttgcggataaggatttaatggcttttaatgcgcctgatttagaactttatcatgctgctgatgtggatgtcgataaagcaacagaacttgcacttcaggctgaaaaggcggctttagaggcggatgaacgcattataaatagtaatggtgcaagttttaattcccatacaggcgtgaaagtttatggaaatagccatggcatgttgcaaagttatttatcaagccgttattccttatcttgttcggttattggtggcgtagaagatgccttagaaaatgattacgaatacacaatttctcgtgagtttgacaaactccaatcgccaatttgggttggcaaaaattgtgcaaagaaagtcgtttctcgtttaaatcctcaaaaattgagtacacgagaagtgccagttattttcttaaatgatgttgcaactggtcttatttctcactttaccgctgcaataagtggtggcagtttatatagaaaatcaagtttcttgctcgattatttaggtaaacaggtcttaccagattggttcaatatcagtgagagaccacatttattacgccgtttagcttccacgccttttgatagtgaaggtgtccgtacgcaagatcgtgaaattgtcgaaaacggcatattacaaacttatttagtgacaagttacagcggtaaaaaacttggtatgccaagtacagggcacgctggaggcattcacaactggcttgttaagccaaatttaacgggaggattgaccgcacttttacgtcaaatgggaacaggcttactcgtaacagatgttatggggcaaggggtcaatatcgttactggcgattattcccgtggcgcatcaggtttttgggtggaaaatggagaaattcaatatccagtcgccgaaattaccattgcgggacaattgcaagatatgttgaagaatatgcttgctgtagcggatgatatagagcatcgttctaatattcaaacgggttctattttgttagataaaatgaaaatttcaggaaattaagaatatttttgaaattgagaataattcttattgacaatgaatgaatatctgttactatacgcacatctgttaagcgattgcaggttgctccaacaggtagagtagaaagtaaattcgttagggttcaaaaaggctgaaggtttaaacttcagccttttttttgtaaaatagcaaacgattttatcccctgtcatttcataaggaaacacaatgaaaaaacaccacgtagatgttttaatctcagagaataatgttcatgcgcgtattgctgaattaggtgctcaaattacaaaattttatcaagaaaaacagatcgataaccttgttgtcgtagggcttttacgtggttcctttatgtttatggcggatattgttcgtcagataaatttacctgtggaaattgaatttatgactacttcaagttatggcactggtatgaccacgaatcacgacgttcgtattaccaaagatttggacggcgatataaaaggtaaacacgttttaattgtggaagatattattgatacgggctataccttggaaaaagtgcgtgatattttgaatttgcgtgagcctgcgagccttacaatttgtacgttacttgataaaccttctcgccgcgaagtggaagtgcctgttgaatgggttggttttgaaattcctgatgaatttgttgtggggtatggtatcgattacgcacaacgccatcgtaatttaggttatatcggtaaagttgttttagaagaataatttgattttattgaaaagtgcggttgaaattttaaatgaatttttagccgcacttttttatattatttcattgctattttctcgatcacttgctaaatctttttacagcaaatacagccgttatattgataatcttgctggggcaattttcttatttttcggcggctatttagtttattcaggcgtgctagccactgcagccgcattttaattaccaaaaagtataaaatataacgaaagaaaacttgttatttttactgaagttgatagtctccaaacactttaatcagttttggagattttttatgttattagtcaatttggcgatatttattgcttttttattgctgttagcacagctatatcgcaaaaccgaaaaattagggcaaacggtatttatcggtttattgctcggtttgctttttggtgcggtattgcaatccgcttttgaaaaacctttgttagacaaaactttagattggatcaacgtggtcagtaacggttatgttcgtttattgcagatgatcgtgatgccgttggtgttcgtgtcgattttatctgctatcgctcgtatcaatcaaaccagatcattgggcaaagtcagcgttggcgtgttatccaccttgctgattaccaccgccatttccgctgcaattgggattgcgatggtgcatttatttgatgtgtcggcggcaggattaatcgtgggcgatcgtgaattagcggctcaaggcaaagtgttagataaagcagggcaagtgtccaatttaactgtgcctgcgatgttggtgtcctttattccgaaaaatccttttgctgatctcacgggtgccaacccaacgtccattattagtgtcgtaattttctcagcattacttggcgtagcggctttgagtttaggcaaagaagatcaagcacttggcgaacgaattgcacaaggtgtagaaactttaaacaaattagtgatgcgtttggtgcgttttgtgattcacttaaccccttacggcgtgtttgcgttgatgattaaaatggctgccacctcaaaatgggcggatattgtcaatttgggcaattttattgtggcttcttacgctgctattgccttaatgtttgtggttcacggcattttattgttcttcgtcaaagtcaatcctgtggattactacaaaaaagtgttgccaaccttaagttttgcgtttacatctcgctcaagtgcggcgacaattccgttaaatattgaaacgcaaaccgcaaaattaggtaacagcaatgtcatcgccaactttgctgccacattcggtgccactatcggacaaaacggctgtggcggcatttatccagcgatgcttgctgtaatggtcgccccaatggtcggcattgacccttttagcttcagctacattctaaccttaattttcgtggtcgccatttcttcattcggcatcgcaggcgtaggtggcggagccacattcgccgctatcgtcgtgctatctacgttaggtttaccactggaattaatcggtttactcatttccatcgaaccgctcatcgatatgggacgtaccgcacttaacgtaaacggtgccatggtggcaggcacgattacggatcgcttgctaaataagtaactggaaatcaataaaaaaatctgcaattgagaattcagttgcagattttttatcgctcaatacttttgactaaaaagtgcggtggtttttttcagtgttttataacttaaatcgatgaataatttgatttgcggaacctcgccaaactaaacttgggtcagcctgttcttgaataaacttcccatcaattaacacatcaatataaggcaacatagcacgttgttgttcgtctaattcatctagcttataacccgtccaaacccagatgtctttatcgggacattctcgttttacgcgttgcacaaagggcagtaatgtttctacgttgcgcggatgaagtggatcgccacctgaaagcgtcagaccttggcgtttaatgcgtgtgtcttttaaatcattgatgatttgttgttccattgcttcatcaaataacacacccgctgaaaatgaccaacttttttggttgtagcaacctttgcaagcatgcgtgcagccactgacgaaaagtgtgcatcttgttccttcgccattaatcacatcggtcgggtagtattggaggtagttcatttcataaaaatcctgaaaatgtggcttaaattctcgccaaattcaccgcacttttgaattaatctttgcaatacggcggtaatttttgcataatagcacgcaatcgcattgcgatatcaatggaaaccttctcggtctctcgcaacggtgtctggtttactcggtcaggtctggaaggaagcagccaaagtcggaattactgtgtgccgagaagaagctgggaaggtttccgcccaacttccttttctcatactcgctcaatcaatcttttaaagaaaccattttctttggtgattaaactattgtaatcgccttcttcgattaatcttccgttatcaattacacaaattttatcgaattgttcaattgaactgagacggtgagtgactataattagggttttattgtcggcatgttgcagaattaaacgtaaaatttgacgttcagtttcgcgatctaagccttctgctggttcatctaacaataaaattggtgcattattgagtaaaatacgcgctaaacctaaacggcgttgttccccaccagaaagtggacgaccgccatccccaagccaaagatttaaaccttttccttcttgctcaagtaatttgcttaagccaacttgatgtagtacttcaatcattttttcatcagaaattttatccgcacttgcaaattgtaaattttgacgaagtgtatcgctgaatacgtgaacacgttgagttaaaaaacaaatttggcggcgtaatgtttcttctgaataggcggaaatgggtttttctgccaataaaagctcaccttgattcgcatcataattgcgtactaaaagttgaagaagtgaagattttccacttccagttttgcctaaaatagcaatttttttgccctgttctaaatctaatgtaagattttttaatacgagtgtttcttgttcgggataggaaaaatttaaattcttcgcagaaattaaccgcacttttgtttcaaattcctcgttaccattaaactcaacaagcggtttttgctcaatgatttcggtcacacgttctgctgccgcaataacttgacctatatgtaaaaatgctgcacccagtggcatgatgatctcaaaggctgcaagtgcagcaaaagtgaaaagtgcaatataagccgtgcggtattcatctgtgccaaaattggcgttacttgcaaaccatagcattccagaaatcaacaaaccattaagaaagagaacaagtgcggtagaaaatccgcttaattttgcttctttggcttgatcttcctgccatgttttttctgtgactgacattttttcttttaatctatcttccgcattaaataataaaagctcggcttgtgcttggataaattctaaaaactgggttcgataggtcgcacgtgcttggattaagcgttcgccaaattgctgtcctagtcgatagaaaacagtagggataattattaataaaattaacaaaaataagcctaaaccaagtgcgagtggaatattgataaagctaagtccaatcgttatggcaatgattacaaatacagcagtgaaaaatggcgcaagtaaacgtaaatagaggctatcaagggtatccacatcggaaactaaacgatttaataaatcgctgttgcgataacgatttaataccgctgggcttaaaggaatgattttttcaaatacttgtacgcgtaatttcgacaaaatgcggaatgttgcatcatgcgtcactattttttcaaaatagcgcatgacggttcgtccgatagctaaacctcgcacactggctgaagggtagaaaaagttaaatagcgtgcctagtcctgcaatggctgtagcggctaaaaaccagcctgaaacggtaagcaagcccatactagagcccaaacctagaatcattagcaccaagcctaaaataagcggaaatttggcgaatttaaataaacgtataaacggaagtaatgtgcgcattattggatatcctgttgtcgttgagtgagtagttcagcaaagaaaccttcatgttgtaattcggtaaatttaccttgctgtactatttctcctcgttgcatcacaaaaatttgatcacattgtttcaaatcttcaattcggtgggtaatcatcagcgtagtttgatgctgacttgcttcattcaatgcttgtaaaacaagattttctgattgcgcatctaggcttgcggttggctcatcgagcagaagtaaatcgcctttgcgtaacaatgcccgagcaatggcaaggcgttgcgcttgtcccacagaaatgcctaatccaccatcttttatttcgtgatgaagtccaagtttatcggtaaattctttcgcttgagaacgcattaatgcttgattaatttcttcatcgttggcttgaacatcgccaagtagtaagttttctttaattgtgccttgtaataacaatggattttgtcctacccacgcaatatgtttgcgccagtcagctagattactttcgcgaagttcttgcccattaattttgagagaaccttcataaggtaaaaagcccaaaattacattcattaatgaggttttccctgcaccactttgccctacaagtgcaacattgtgatttgctggaatttggaagtttaacggcttggttaatgctgaaccctgtgtcgaaagcaccactaaattttcggcagaaatttcaaccgcactttctaaagaaattgttttttcattttgatgtacagttaaataatcggattctaaaaaatcaacaatggcatccgctgcaccaatacctgctgcacggtcgtggtaataagtgcctagatcgcgtaagggttgataaaattcaggtgcaagaattaaacaaaagaaacctgtgaaaagtgtaagcggtgcattataggtaccaaattcaatttgacctaagtagctaaaaccaaaatagaccgccatcagtgcaatggaaatagaggtaaaaaattccaatactgcagaagagagaaaagcgagttttagcacatccattgtggtttcacggaaatcttcagtggcattttcaatatgctcagtttgttcagaagtgcggttaaaaagacgcaaggtttccaaaccgcgtaagcgatctaaaaattgggcactgaggcgagaaagggtatccatatttttttggctgttgtcagccgcagcaataccgacaatgatcataaacagaggaacaagcggtgcggtaatcattaagattaagcctgcagcccagttcaacggaaatacagcaatgaaaataaccactggaacaatggctgaaagactttgttgaggcagaaaacgggcatagaaattatgtaagttttcaacttgttccaacataatgcttgcccaacttccagctggtttttgattgattgtcgcagggccgacaagatggattttatccagaattttttgacgaatatggttgcgtaataattgtccgctttggaaacctattttttcgcgtgcccataaaataatagcacgcatcccgaagccgataattagcccgagaaaataaggaataagttcatcacgaggcatattttgtataatcagtttatcgagcaacgtcgcaagaaaataagtttgtgcgactaaaatgaatgaagaaagcgtagctaagacaatgtttgcacgcattaattttttgataggttcttgttgtgcgcgaagccatttttgtaaatatttttggcgaagtttattcattgttttggtcgtgattatagaaaaagttcccctctttaaaagagttaaaagaggggaattggttagaagatttatgcttcttgagcatctaaatagcgttctgcatccaaggctgccatacaaccagttcctgcggaggtgatggcttggcgataattgtgatccatgacatcgcctgctgcgaacacgccttccacagaagtggctgttgcatttccttcaagaccagattttacaacgatatagccattattcaattctagttgcccttggaaaatttccgtatttggcgaatgaccaatcgccacgaataagccatctaatttgagttcttctttctccccagtttttgtgttggctaaacgtaatccagttacgcccatattatcgcccaatacttcatctaaagtgcggtcagtatgaagaacgattttcccttcttctacttttttgtataaacggtcgataagtattttttccgcacggaagctatcgcgacggtggattaaatgcactgtacttgcaatattggctaagtaaagtgcttcttccactgctgtatttccaccaccaatgacaccaacaggcttattacgataaaagaaaccatcacaggttgcacaagcagaaaccccacgacctttgtagttttcttctgaaggtaagccaatatagcgtgcagaggcacccgttgcgataattaacgcatcacaagtgaaattttgtacatcgccaaaaagtttgaatgggcgagaagataaatctacgcgattgatatgatcgaagacgatttctgtttcaaatttttctgcatgttgcaacatacgttgcattaaacctgaaccagtagtcatcttaaaatcacccggccagttttcgatttcatctgtagtggtcagctgcccaccttgttgcaaaccagtcaccaatactggttttaagtttgcacgtgccgcataaatggctgctgtataaccagcaggacctgagcctaaaattaaaagttttgcgtgtttgatatctgacataaagaatccttgtttgtagttaagtaataatataatgcaataagttgcattttactgattataaactttttgcttaataaagcagcgaataaagcaatcgacgaaatttatttgtcagcggatcagcattgcccattgcgcttaaaatagataaaaattgttgtttaacttcgccattctgcgcgcttaaatctgtttttaaaatgccgaaaagtagtgttaatgcttcttcatttcgtccagcttgatgaagttgtacagcaagttttattgcaatttcagctgttgggtttttagcataatcagcctgtaattgttggatttcaggtgtatcggctgcttgaatttgtagctcaatttgtgcttgtaatccgtgccaacggctatcacgatcttgcaatggaatttgatttaaaatttcttgtgctggctccgttttcttcattgcaatataggtttccgcatagagcagggcaacatcactgtttttcttatcggaaagttcccatgcgtctttcaacaatggcaatgcagcttcgtaattttctacttgcaagaaatctaatgcttgttggaattttaaatcttcctctttaggtaaaataatgcttaatcgttggattaatgacgctttatcaagcatgcctggaaatgcatctaatgcctgtgcttctttaaacaaataggtggttggcaatgcttggatgcggaattgtgcggcaatcatttgctctttttcacaatctacttttccaagaataaattgtccttgatattgttctgcaacttgctcaagtagcaccaaaaaatccgccgattctttatgtgttggcacgtaaaaattgatgacaagtggtttttctaaggattgttgcagtatttcagtaagattttgttcgttgatctcaacgataaaaggaaaatcagccatgttttatccttgtgaaaaaataatggctgattttagcaaagtgcggaagattttagaaacgttttaccatttattaagcaagtttttctaggatcaattttcccatcatttcaatatgtgcatgctctacattaagtgcgggaatatattgataagattgcccactattttttagaaaattttctcgattttctttgtcaatttcttcaatggtttctaaacaatctacggagaaacctggacaaatgacagctattttatgaatgccttgtggtgctgcattttgaagaaatttatctgtgtaaggctgtagccattcttcacgcccaaagcgcgattgaaacgtcattccccattggttttctgttaagcccagtttattaaccactgcaatagtcgtttgtttacaatgttcacgataataatcgcccattttttcataacgcaaaggaataccgtgataagaaaatagtaaaaactcatcgggttttaaccgcacttttatggaatcggctaaggcgttaatgtaattttcatcaacatgataagaatggatgaaatcaaaaggcactaatcctcgttcttctttaagggcgttagcgaaagcatcaaatactgcacccgtggttgagctagagtattgcggataaagtggcaaaacaataattcgttcaacttgatttttaagcaaattttttaccgcactttgtatcgatggattgccgtacgtcatggcaatttctacttgtgtatcgatgttttgcttatctaaataggcttgtaatgcgtctttttgttgtcgtgacatggcaagtaaaggcgaaccttgttctgtccagattgcttgataatttttggcgatacgttttgaacgtaatggcaaaataatggctttgagcagtggataccatttgcaacggggtaaatctaccacgcgaggatccgttaaaaattgccataaataacggctaattgacttcggtgtcgggctatctggcgtgcctagattggcaagtaatacgccgatttttgcggattttgtcataaattgattacggaaagggttaatctagaaacacaacaaagtttattctcttctgtgcggatgtcaatttgccaaacttggatatttctgcctaaattaattggcgtggctctcgcggttactttacctgaactaacagggcgaagatgattggcgttaatatccaatcccaccgcagttttgccttcttctaaacaaagcgaacccgcaagggaaccaattgtttcagctaaagcaaccgaaaccccgccatgcaataagccaaacggctgcatagtacgataatccaccggcattgtcgcttcaatccaatcctcgccaaaagcagaaatttcaatgccaagatgactaactgcactgttggagcagagttgatttaagttttcgagcgtgaagtttttttgccaaatcatgatgttcctttcattacgctaaaatttctaataatgcctgcacagggtgttttagcaccacatgttcataacgttttacctgactgcggcaagaataaccagttgctaaacaaaagtgcggatctttttcatgcagttttttatgccaggatacatcgtagatttctcggctcattttttgattttgtatttcatgtccaaatacaccagccataccgcaacatcctactttttctacattaagttgttgtccaaatcttccaaaaatttcttgccattcttttggactattcggcataaaagtagattccgtacaatgcgggaataaataccaatcgaaagtgcggtcagttttggcgatgtttttcagtttatcttgtaatgccgtattttgtaatctttgttttaaccattcgtgtgcggtgagaacgtgaaagtcgccacgtttttcttgtagtgcttctttgtattcatctcgataagacagcacgatggctggatcaacgcccacaagaggaatgcctaattttgccattcgatttaaaaactcggcttgattttgtgctgttttgctaaagcgttttaagaaacctttaatgtgcattgctttgccgtttggtttaaatggcaacaaaattggtgtaaagcctaattcctgcgtaagcataacaaaatcgcgtaccactttcgcatcatagtaagaggtataaggatcttgcacaataaataaaatatcgtttttttctaccgcacttagatcttccaattcttccaaggatttgccttgataatgaatttctaccagctgttgttgcaaattgggttcagaaagcaaaggcaaatcagtcattcctaatgttttttccactaatgtttgcgtgacttttagcttggtaaaataattaaagaattttgcctgttttgccatataaggcgcagcgatttctaaatttgccacaatgtggtcttttgcggggcgtaagtagcggctgtgataaaaatgaaagaatttcgcacggaaacttggtacatcgattttaatcgggcattggctcgcacaggctttacaagcaaggcaagtgtccattgcagcttttacttcgtgagaaaaatcataatccccttgccatttttgaactgtattgcttagtctttttacaagtgcggttagttttatttctgttttacggaagtctaattgtgcgggcgaaacattttcatttgccatcaatcgaagccattctcgaaccatggctgcgcgacctttcggcgaaaatacacggtttttactgactttcatcgatgggcacataatgctgtgttcatcaaaattaaaacataacccgtttccattgcagttcattgcacccttaaattcatcacgcacttggataggaatttggcgatccttatcagctcgcatcggcgaaagaatagaataaagttcatctttggaatccaaaggcgtacagattttgccgggatttaagcgattgttcggatcgaataaggttttgatataacgaagttcgtgccagagttctggggtaaagaatttttcgccgtaatgggaacgcacgccttttccatgttctccccagagtaatccgccatatttaattgtaagttctgccacttcatctgaaatttgtttgaataatttcacttgttctttatcgcataaatcaagtgcagggcgaacgtgcaatacgcctgcatccacgtgaccaaacatgccatattgtaaatggtgctggtctaataaagcgcgaaattcactaatgtaatccgcaagattttctggggggacacaagtatcttccacgaaaggaatcggtttagctacaccttttgcattaccaagtaagcccactgctttttttcgcattgcataaatacgctcgatagaaggtaaatcagaacaaatttgatagccaataatgtgatcttggttgtgttcaattttttcatcaagtaagcgacaaagtgcggtgacttggaggtctattttttctttattattaccagcaaattccacaatatttaaaccaagaattggatctttttcatcttctgtaagaagttcattcacagagtgccaaataatatcttgtttggcgaggtttaagactttggaatcaacggtttccacagaaagcgcattggctttcaccataaaaggggcattgcgtaatgctgcatcaaaagaacgatatttaatattgatgagcgtgcgatattgcggtataggcagaagattgagtttggcttcgcaaataaatgcgagagaaccttcagagccagtgagaattctcgtgagattgaattcactttcatcttcattgaatacatttttcagatcgtatcccgttaaaaaacggttaagttgtggcagatctttaatgatagccgctcttttttctttacagtgttgcgcgattgtttggtggagctttttgctactctcacttaatttaagcgcatcgatgttttctaaaacatcaacagaattgaccgcacttgtatctaaaatttcaccgttcattaacacggcacgcaatgccaaaacatgattagaggttttaccgtattgtaatgaaccttgcccagaggcatcggtattaatcattccacctaaagtcgctcgattgctggtggatagctctggagcaaagaataaaccatgtggttttaaaaattgattaagttgatcttttacgacacctgcttgtactttaacccaacgttcttttacattgagttctaagatggcagtcatatgacgagaaagatccactattatattgttattaatggattgaccattagtgccagtgcctccaccgcgaggcgtaaagctgattgattgatattcaggtaaatttgccaatttggttatccgcactatatcagcaacattttttggaaaaagaatcgcttgtggaagttgttggtaaacgctgttatccgtagccagacttaatctatctgcatagtttgtcgcaatatccccctcaaaatgttggcattgaagatcatcaagataatcaagtacatattgttcaacttgaggaatgcgatttagatttggcaacatagtatttgacccatttaaacatatcagatggagactttgataatatcctaaggctagaataatgtcgattaggaaagagagaggagaaggtaaaaagtctgtttaagaaagtgttattttggataaaaactaaacaaataattcaaaataatttgatctttttaaaattcataggataatgatcacacttttgaacgttcctttggggtaaacataagcaaaggaattgaatttgtcaaaaggtaataaagtagggcaaattcaaaaccctagttaagtgactgtttagaatgtagctttaattaaaagttcagtataaacaaggacacttttttattactattcgatcactaaatagaggacatcaaaatgaaaaaaactgcaatcgcattagtagttgctggtttagcagcagcttcagtagctcaagcagctccacaagaaaacactttctacgctggcgttaaagctggtcaagcatcttttcacgatggacttcgtgctctagctcgtgaaaagaatgttggttatcaccgtaattctttcacttatggtgtattcggtggttatcaaattttaaatcaaaataacttaggtttagcggttgaattaggttacgacgatttcggtcgtgctaaaggtcgtgaaaaaggtaaaactgttgctaaacacactaaccacggtgcgcatttaagcttaaaaggtagctatgaagtgttagaaggtttagatgtttatggtaaagcaggtgttgctttagttcgttctgactataaattgtacaataaaaatagtagtactcttaaaaacctaggcgaacatcacagagcacgtgcctctggtttatttgcagtaggtgcagaatatgcagtattaccagaattagcagttcgtttagaataccaatggctaactcgcgtaggtaaataccgccctcaagataaaccaaataccgcacttaactacaacccttggattggttctatcaatgcgggtatttcttaccgttttggtcaaggcgcagcgccagttgttgcagcacctgaagttgtaagcaaaactttcagcttaaactctgatgtaactttcgcatttggtaaagcaaacttaaaacctcaagcacaagcaacattagacagcatctatggcgaaatgtcacaagttaaaagtgcaaaagtagctattgctggttacactgaccgtattggttctgacgcgttcaacgtaaaactttctcaagaacgtgcagattcagtagctaactactttgttgctaaaggtgttgcagcagacgcaatctctgcaactggctacggtaaagcaaacccagtaactggcgcaacttgtgaccaagttaaaggtcgtaaagcacttatcgcttgtcttgctccagaccgtcgtgtagaaatcgcggtaaacggtactaaataattttagtatttgtttaacgaaagattaaatatagaaaaaggcttaaacttcggtttaggccttttgttttaaatgaatataaaaccaagcatttcaatcaagttttaacttgtgataaaatgcgtacctcgtttatttatagggaacattatggaaaccttagacaaaatcaaaaagcaaattagtgaaaatcccattcttatttatatgaaaggttcgccaaaattaccatcttgtggtttttctgctcgtgcatctgaggcattaatgcactgcaaagtgccttttggttatgtggatattttgcaacatccagatattcgcgctgaattaccaacatatgcaaattggccaactttcccacaattatgggttgagggagaattaattggtggttgtgatattattttagaaatgtatcaagcaggcgaattgcaaactttattagctgaagtggcagcaaagcacgcttaatcacagtggaaaaataaaacccgcaataagcgggttttttatataataagtttccctttcattattaaataatagattaagcaaactttaataccttagaaagtgcggtgaaaaatttatcgttttcttcaggtaaaccaatacttatacgtaaatgatttggcatgccataaccagcaattgggcgaacgattacgccttctcgtaacaacgcatcataaattggtgcggcaggttgtttgaaatcaatggttataaaatttcccttagagggaatataatccaattgatttttttgacaaaagtcttcataacgtcgcatttctattcgattattttcagcgactttttcaacaaattcatcatcattcattacggcaacagcagcggttaatgccaatgaattacagttaaatggctgtcgaactcgatttaataaatctgcgatttcaggattagataccgcataaccaatgcgtaagcctgccaagccataggctttagaaagagaacgtgaaataattaaatttgaatatttttttaataaactgaaagagtccactcgttcttcagatctagtaaattctgtgtaggcttcatctaataccacgattacattttcggggacttttgctaaaaaatcttcaatttcttgcgatgttaaaaaattacccgttggattattgggattagcaatgtaaatgagctttgttttatcagaaagtgcggttaaaaatccttgtaaatcgtgcccccaatttttagctggaatttcttttgcaattgcatttatcgctttagtcactaaaggataaacaataaaggcatattgtgaataaatgatttcatcgccttccgttgcgaaagtgtgagcaaaaagttctaataaatcatttgagccatttccaagcgtaatttgatttggttgaacgccaaatttttttgcgatagtttgttttaattcaaagccattcgcatctggataacgagttagtttatctaattgttcgataattgctttttttgcactttctggaaaaccaaatgggttttcgtttgaggcaagtttaacgatattggaaataccaagttctcgttctaattcctcaatgggtttgcctgcttgataaggggataaggattttacgccacgattggcaatgttgatgtactgcatagtgttatttgtaaatattgatatgaattagtatgaattttctagtaaatttgggcgtaaatacgcccattggaaatgtttttcctattgaggcagattttcagtttcaaattttttcataaatgaaatgagtgcctcaacaccattttgcgacattgcgttataaatagatgcgcgcattccacctaaaaccttatgacctttcaaggcttgcaagcccgcagcagtagactctgcgacaaattttgcatctaattcaggattacctgtgatgaaagtgacattcattgttgagcggttttcttttgctaccacattgcgataaagtttgctcgaatcaatataatcataaagagtttgtgcttttagtgcattacgtttttcgattatttctaagccgcctatttctttaagatgtttaaatacgagggaacataaataccacgcaaaagttgggggcgtgttgatcattgagtctgcatcacgttgagttgcataattccaaatagatggggtttctttacgtgtattaccgattaaatcatcacgaataatcactaacgtaatacccgcagggccaagatttttttgcgcacctgcataaattaccccaaatttactgatatcgatttgacgtgaaagaatatttgaagacatatccgcgaccaatacggcattgcctacatttggcacatcaaaaatctccacaccactgatggtttcattcgggcaataatgaacgtagtcatattgatcagcgatatggctaaaatcaagatcggtaattcgagtctgttcgccattttctacgatagtgatttcatcaatttctgcaaaatttcttgcttcttttgctgctgtagctgaccaatgcccactatttaaataaagggctttgccttttttaccgattaagttcatcggaatcgcggcaaattgaccgcgagcgccaccttgtaagaaaagtgcacgatagttatcgggaatattgtaaacctcacgtagatctttttccgcttgggtaacgagttccataaaatactttccgcgatggcttacttccattacagaaacaccttgattgagccagtttataagttcattttgtgctttttgcaacacttctgggaaaatcatcgcagggcctgcgctaaaattaaagacttgtgacattgtatttccttgctttttatgaaaataatgatgtcttttttatcactacaaaaatcgataatcaatgctttttactgaaatcaaaaaaattctttctatcattcataaaatagagggtaaattttgacgattgattaaaaaaaagctaaattacggcacagtcattttatttattttaaagggagttgttatggaaattgtgaataaacaatcttttcaagatgtgttggaatacgtgcgtatgtatcgtttaaaaaatagaattaaacgagatatggaagacaataatcgtaagattcgcgataaccaaaaacgcatattgttattggataatttaaatcaatatattcgtgatgatatgactattgcagaagtacgcggaattattgaaagtatgcgtgatgattatgaaagccgtgtggatgattacacaattcgcaatgctgaactttctaagcaacgccgtgaagcgagtacgaaaatgaaagaacagaaaaaagcacacgcagaattattgaaaaatgctgaaaaataataggataactagagccgactgaatcagtcggcttattttttataagctattcattgcgttaatgattttaatttcatcaaaattgacaatatcttcttggaatattgtgcgttcttgaattttcccttcttgtaataatttttctcgttgtgtgcctaaaagcaatggcgtgtctggcgtgtaccatttttttccttggcgaaaaattaaattaccgatggaacaatctgtcacttttccatttttgataatcataatttcatcacaagcaccacgttgagcaaataatgtattaattaaactgcgatctaaatatttcaaactatattcaatgtcatcacaaattacaggttgaaaagtgcggtagatttttcgttggtattcaaaatattgaatttgtgtggtttcggcattgtaatcaatgcggcagcgaactaatcgattttgtaagggcgttggaagttgaatgagtgaaaaaagattaaaaattttcaccgcacttttaccataatattcacgcaaactatgttcatatcgcacttggtgtaaatcgatattttgaattttcccgttttcaatacaaagggtttcaaatagagggaacattaatcagcaccttcaatcggcaaatagactttttctaacaattcttcatattcatcttgcacattgctatgaatggtaattccacctccactatgaaaataaaatttttcatctacttgagaaataaatcgaattgccaccgcactttgtagtgttttgccatcaaatatgccaaaaattcctgtgtaataaccgcgtttttgtttttctgcttgttgaataatttgtgtggttttttcttttggtgcgccactaatcgacccagcaggcaacagtttcgctaaaatatccccaatttgattttgccagttttcattcaattttccgtaaatttcagaactggtttgcagtatttcgcctttctgggttttgatacgatcgatataacgaaattttttcacttgaatgtgttctgccaccatggataaatcattacgcattaaatcaacaattgtgtaatgttcgcgttgttctttttcatttgtgagtaactgattttctgcatcgggcagagaggcattaattgtccctttcatgggataggtaaaaatattgttgtcatgaatattgacaaaacattcaggtgaaaagcaaacgaattgatcttgtaaccacaatttataaggtgcattggtttgatgaaaaatttgttcaagtgacagattacctgaaatttcagtggggtaggtgagatttaataaataagaattacctttttgtaattcactttgaacaagtttaaaaccttgttgataatgcgagaaaggcattggatgtttggtaaaattaagagggagaggccgtggagaaattgtgcaatttcttttgcctaaaatatcaaaataaatgccttgttgtgcagaattttcgagaggacaaatcaatggtttttctttttcaaaatcaataagaaagaaaaatggcgtgcgttgtttgccataatgattagcctgttcaataaaatgttgcattgtgctttgtgccattttgcgtaaaatgacctgattataacgaataccgaactgttatgaaattactcatcattaataatcacgattcttttacttttaacttggtggatttaattcgaaaattaaatgtgccttatgatgttttaaacgtggaagatttaaaggaaaatacagcggaaaattatagccatatattgatttcgccagggcctgatataccacgcgcttatccacaacttttttccatgttggaaaaatattatcagcaaaaatctattttaggtgtgtgtttagggcatcaaaccttatgtgaattttttggtggtacattgtataacttagagaatgttcgtcacgggcagaaacgaacattaaaagtgcggtcaaattctccattgttttttgatcttccaactgaatttaatatcgggctatatcattcttggggcgtacaggaagaagattttcctagctgcctagaaatcaccgcactttgtgatgaagatgtagtgatggcaatgcaacataaatctttgccaatttatagtgtccagtttcatccagaatcttatatgtcagactttggagagcaaattttgcgtaattggttggcgattcctcccacaactaacccataataccgcttgcttattaagcaaaaatgcgtattatagccgtctatacgtcaatacatccaaatttaaaagaatgaagagagaaaatatgtctagttatttatttacatctgaatcagtctctgaagggcatccagataaaattgccgatcaaatttctgatgcggtacttgatgaaatcctaaaacaagatccaaaagcacgagtagcttgtgaaacttacgtaaaaaccggtatggcattggttggtggggaaatcaccacatcagcatgggttgatattgagaatttaacccgtaaagtgatttgtgatattggttatgaacattctgaaatgggttttgatggtcattcttgtgcggtgcttaatgcgattggtaaacaatctgcagatattaatcaaggcgttgatcgtgaaaatccattagatcaaggcgcaggcgaccaaggtattatgtttggttatgccaccaatgaaacggatgtattaatgcctgcagctattacttatgcacatcgtttaatggaaaaacaatctgaagtgcgtaaaagcggtaaattagcatggttacgcccagatgcgaaaagccaagtcacgttaaaatatgaagataataaaattgttggtgtggatgcggttgtgctttcaactcaacattctgaagaggttagccaaaaagatttacatgaaggtgtgatggaagaaattatcaaacctgtattaccaagtgaatggctttctaaagaaacaaaattcttcattaacccgactggtcgttttgttatcggtgggccaatgggcgattgtggtttaactggtcgtaaaattatcgtggatacttacggtggtgctgctcgtcacggtggtggcgcattctcaggaaaagatccatctaaagtagatcgttctgcagcttatgctgcacgctatgtcgcaaaaaatattgttgcagcaggtcttgcagatcgttgtgaaatccaactttcttatgcgattggtgtggctgatccaacatctatcatggtcgaaacctttggaactggaaaagttgcgaatgaattattagtgtcattagttcgtgagttttttgatttacgtccttatggcttaattaaaatgttagatttaatccaaccaatctatcgtgaaacggcggcttatggccatttcggtcgtgagcaattcccttgggaaaaagtggatcgcgcagaagatttacgtattgcggcaggtttaaaataataggcttgaatttttagtttgaaaggcttatatttagaaggcaacaaggtttcttgttgccttgactgataagtgttaccaagctggcgagctatacagtaacacaataaatgtgatgactataaagataattttcatcaattttgtctcccaatcagtgttaaaacaaactgatcgagatgattgcattacctgaccccccagtcaggtaatgacaacacctgaccagccactgatcattctatcatataaaaaccgcttatctagcggtttttgcttttaccgatgacatcaatatcactcattccatttcgtcatttaaaaatgcaagtgcaacgcaaattgaatcagtctttgcagcttgcagaggcttattttaagcgaaaatttacaatgcctgaggtaaattatgagttacgtggcataaaggcaggcgtggcttacctgcaaaaaaatgaaataaaatttaaccgcactttattgcaagaaaatacggatgaatttattcgacaagtcgtgccacacgagcttgcgcatttgattgtgtatcaaatgtttggtcgcgtaaaaccacacgggaaagagtggcagcttgtaatgaatgaaatttttaagcttcccgcagacacttgccatcaatttgatataaaaaatgtgcaaggtaaaacctttgaatatcgttgtgcttgccaaacccattttctaactattcgtcggcataacaaaataatgaaagaaaacatcgaatatttgtgtaaaaaatgtaagggaaaattagtttttgtcgatgatgaagaataatttttgtgatatattttttcagcttattcaataaataaaggagttatccaatgaaaaaatctttattagcagttattgttggtgcatttgcctttgcttctgttgcagatgcgaatatctatgctgaaggcgatatcggtttatctcaaactaaagcaaacggtagtaacaatacaagagttgaacctcgcgtatccgtgggttataaagtaggaaatacacgtgttgcgggtgattatactcatcatggaaaagttgatggcacaaaaattcaaggtttaggtgcatcagtattatatgattttgacacgaattctaaagtgcaaccttatgttggtgctcgtgtagcgactaatcaatttaaatacaccaatcgcgcagaacaaaagtttaaaagttcttctgatattaagctcggatatggggttgtagcaggtgcaaaatataagttagatggcaactggtacgcaaatggtggagttgagtacaatcgtttaggtaattttgatagtaccaaagttaataactatggtgcaaaagttggtgtggggtacggattctaatttttagaatacaaaaatcttttttataaaacactttaatttaacggtgatcgtttaaaacaatcaccgttatttattttgggattatttcaatacgctaaaacccaaaacttaccccagttgcagcacccacaccgttattggtatcagcagagccagaaaggctaattaccatatttggtttaggcgtataacggactccagctgcaacagcagattgtcctcgataaagtccctgcagctacgccagtaatttggcgggttatgcctcttattttattccccactgaaaccgaacccgcagtgcctttccaagttgaaactaatttatttttagctgtttcataagatttagtcgcgttgtcaatcttagcttgatttggattagctgcggttttcaactgttccatattgctttttaacccagcaacttcctctttttttttcggcaaatcgtaaagaatattacgtaattctgccaaatcagcataattttgacgctctgttttataagcattttccaatggcttaatttcaaaaatatgtgatcaagatcacaaaataaaaaatcccaacggagattgggatttaaaatcactaaaaattttaccgcactttatgctttgcttacttcaaaacgttcaaatgccaatacttttttctctaatttacgtagtaataatgttgcaatgcctgtgataattaaatagataccgcccgcaatgccgtaaattgtgattgcatcatattctgtcccataaagttggcgtgcgtaacccataatatccataatcgtaatggtggatgctaatgccgtgcctttaaataccaaaataatttcgttactgtaagacggcaacgcacgttttaaggcataaggaattaaaatttttaaagtttgtatgcggtttaatcctaatgcgccacaactttcccattgtcctttgggaatggctttcactgcaccgtgaaataattgggtggaataggctgcactgtttagcgctaaagctaatgcagcacagaaccacgcattggataagacataccataatgggctgtcaataatccattggaattgaccgggtcctgcataaattaaaaagaactgtactaacagtggcgtgcctgtgaataaagtaaggtataaattaaccgcactttttatccatttattttccattgaaagtaaaaaagtaagaaataaggctaaaaagaaagcaatcagtaaggatacgactgtaagcaacaaactcgttggaatcccttgtacgatcacgcttaaatattcttgaaacattatttcacgcccctttcaaaacgagtaaaacgcagctctaattttcgaataccaacttggctaattaatgtcactgccaaataaattaacgcagcaataccataccaagtaaaaggctgatgggtgttggtattaatcagatccgcttggtgcatcaaatcgtccacaccaattaatgaaaccaatgccgtatcttttagcaatacaagccattgggtgcttaaaccaggtaaggcgtgacgccatacttgtggcataacaatatgaatgaacgtatagcttttgcttaagcctaacgctgcacctgattcccattgtccttttggtatggcttgaattgcaccgcgtaatgtttgtgaagcataagctgcaaaaatgagagaaagcgcaaacacaccacagccaaatgccccaaattcaatgtattctcctgtcagcatttctactaattcagtagaaccaaaatagacaagtaatacaacaataatttcgggtaagccacgtaataatgccacaaatactgtcatcggcttgccaacaaagcgatttgcttcaagcacggcaaaaataaggcttaaaaataagcctaagagcaatgaacagaccgcaagccctaaagtcattagagcagcggtaaacattaaagaaagaaagtcagaaaacataaattattttgtcatccatttatcatagattttttggtattcgccatttgctttaattgcagctaaacctttgtttaattgtgcagccaaatctttgtttgatttgtgcattgcaatacctaaaccattaccaaaatattttttattggttactttttcgcctataaattgaatttctggctctttggaaatcatatcggaaagcactgcggtatcgcccaaaataatgtcaatccgaccgctctttaagtctaaaatggcattttgtaaacttgcataggattttggactatattgcttggtttctgctacggtatattgttggaatgttgtaccattttgaacacctatattttttgcactttctaaggttgctttgcctttaagagcaacatagcttgcagagctatcgtaatacgcatcagagaataacacttgttttgcacgagcatcggtaatatcgattgcggaaattgctgcatcaaaacgttttgcttttaaacttggaattaatgaatcaaaggtttcgctcttgaatttacaggttacttgaatttcttgacaaattgcattcgccacatccacatcaaaaccaataatttcgccttttgcatttgtggtttcaaatggtggatagctaggttccattgcaaaagtgagttcttgtgcgcttacagcaatagatgatcccaataaaatggcagttaataatgtttttttcatcgtaagttccttattttctagtgagaaagatagtgtttaaattgttccgtttttggattttcaaagcaatcagccgatcccatttcgacgattttaccttgttccatatagacgacttttgtcgctactttttgcgccacattgacttcgtgggttacaatcacttgcgtaatgccagtttcttgtaattctttaataatatctacaacttgcgctgtaatttctggatctagcgcagccgttggttcatcaaataatagaacttgtggcttcatcatcagggcgcgcgctattgcaacacgttgttgctgaccgcctgataaatgcaatggaaagcgatcggcaagttgttctaaacgtaaacgttttaacaattccattgcatcggttttcgcttcactttcactcacaccacgcactttcattggtgcttcaattaggttttcaattaccgttaagtgcggccaaagatgatattgttgaaaaaccattcctacatcttgacgtaattgtcggattgctttgggatttgccattgcattggataaattaaaatcattatttgcaatacttaattcaccagactttggcacttctaacaaatttaatgtgcgaattaatgtacttttgcctgcaccacttgggcccagcaacacaacggtatcgccttcttctgcttcaaggttaatatcaaataacgtttgtgatgaaccgtaaaagaaattgagatttttaacacgaatagccatttttcttctctatgcttcataagatgaaaaaatattacatttttatgcataattatgcaagtgctattaataaaaaatcccaaaaaaatttgggattttaaaaactcgattgaaatcaaccgcactttaggcttgttttgccatttcaaactcaattaacatcattaaaatatgaataactttgatatggatttcttgaatacgatctgcataacggaaatggggtacacgaatttcaacatctgctaatcctgccattttcccgccgtcttttcctgtcatcgcaatcactttcattccttttgcttttgccgcttcaatagcatttaagatattttttgaattaccagaggttgataaaccgaataacacatcgcctttttgccccaccgcttcaacatagcgagaaaagacatattcatagccaaaatcattacttacacagcttaaatgacttacatctgaaatcgcaatagcaggataacctgggcgattttcacgataacgacccgttaattcttctgcaaaatgcatcgcatcacaatgcgaaccgccattaccacaagaaagcactttgcctccttgtttgaagctattcgaaattaataatgccgcttcttgaattaatttaatgttattttcgtcagaaataaatttgtttaacacatcttgtgcttccacaagttccgctttgatttgatctaaatacattgattgctccttgttgggaataaaatcgcgatggcattgtatagcagatgaagattcttcgccagcctaaataaaaattcatcttttttcgatgaaataatgattttttgcgatttagatcgaaaaaataagtttgagtagttggggatttttcaagatatgtttatcttacgtaaattcttagccctttaattttcaaaaacacaatgaaattttaccgcactttgttacttttctttgctagttcttttgcttttgctaactcagatttaatgcttcttcatacctataataatcaacccatatagggttgggttatgtctgaaaagttagatggcgtacgcggttattggaatggaaagcaattattaacccgacaagggcaacctttatcgccgccagcttatttcattaaggattttccgccttttgcgattgatggcgaattatttagtgagcgaaatcattttgaggaaatttcatccatcacaaaatcttttaaaggcgatggttgggcaaaacttaaattgtatgtttttgatgtgcctgatgcagagggcaatttatttgagcgtttagctaaattgaaagcctatttacttgaatatcctacaacttatattgaaattattaagcaaattcctgttaaagataaaacccatttatatcaatttcttgcacaagtcgaaaatttgcaaggcgagggcgttgttgtacgtaaccctaatgcatcttatgaacgtaagcgaagctcacaaattttaaaattgaaaacagcacgagatgaagaatgtacggttattgcacaccataaaggcaaaggacaatttgaaaatgtgatgggtgctttaacttgtacaaatcatcggggagaatttaaaatcggttcgggttttaatttaaacgaacgagaaaatccccctccgataggatctgtgattacttataaatatcgaggcattacgaatagtggaaaacctcgatttgcaacctattggcgagagaaaaaatgagcctatttataaatctgacaaaatgaatttaatcaatatggaaacaagcgattaattttccatcagtatattgttccaagtgcggttgattttcacgacatttttctgtcgctttccaacaacgaggattaaatgcacagccttttggcggattaattgggcttggcaattcgcctgtcagcttaatacgctcacggcgcaagtttggcgacaaacgtggtgtcgctgaaagtaacgctttggtataaggatgctgaggattagagaaaatttgttctgtcgtccctttttcaatacaacgacctagatacattaccatcacttcatcagcgatatgttctaccacagaaagatcgtgtgaaatgaatacgtaagacaagcctaattcatcttgtaaatccatcattaaattcagtacttgtgcacgcacggaaacatccaatgcagaaacaggctcatcggcaacaacgacatcgggatctaacattaaaccacgagcgatggcaatacgttggcgttgtccgcctgagaacatgtggggataacgatcataaaattcagcgcgcaagcccactttttccatcatcgataaaactttttctcgacgttctttggcggaaagttttgtattgatgattaatggttcttccaaaattgaaccaatctttttgcgtggatttaacgatgcgtaaggattttgaaaaactatttgaatttttttacgacgtagtgcttttgtttcagaatcattttctaaaaaattatgtcctttgtaataaagttcgcctttggttggttcttcaatcattgtcaataaacgacctagcgttgattttccacaaccagattcccccacgactgctaaagttttacctcgttcaagctgaaaagagacaccatccaacgcttttacttgctgtggttttgcaaacaagcctttttttacagggtaatatttttttaagccaatggcatttaataatggcgtattttcttttacttcattcgtcattattaagctccttgatattcaactggattgccttgctcgttcagcggagtatggcattttactttacgcgaaccgatatgatgcaattgaggttcaacttggcgacaatattcggtggcataagggcagcgaggatttaataaacagcctgttgggcgatcgtattttccagggacgaccccttgtaatgattctaagcgagattttccctctgcaaattcaggtaatgaacgtaacaaggcttgtgtgtaagggtgttttggctcgcggaaaatatcttttgcggtgccttcttcaacgatttgtccagcatacatcacgataattcgctctgccgcttcagccacaagtgctagatcgtgagtaatcaaaattagggacatgcattctttcttttgcaattcaagtaagagttccataatttgagcttggatagtcacgtccaatgccgtggttggttcgtcagcaatcaataatttaggtctgcaagcaattgccatcgcaatcatcacgcgctggctcattccaccagacagctgatggggataaacatcaatccgagattcaggatcaggaataccgaccaattttaaaagctctaaagtgcggtcttttcttgccttttttgtgccgccctcgtgagtttttaacgcttccataatttggaagcccacagtataagcaggattcaaacttgtcatcggatcttggaaaatcattgctacatcagcaccaataagctggcgtttagctttactctctaaagtgagtaaatcagtattttcaaattgcaaggattcagcagatacacgtccaggatgatcaattaatcccataattgcgagagaactcacagatttacccgaacctgattctcccacaatgccaagcacttcgccttgtgcgacttgatagctaatgcgatccactgctttaaatggcgtttttttatcgccaaagtgaacagaaagttcttttacgtctaataatgccattctgttttcctattgtttgagttttggatcaagggcatcacgcaagccatcgcccattaagttgaaagctaataccaaagataaaatcactaagccaggaattgtaactaaccagtttgccgcttgcataaaaccgcgtgcttctgaaagcattgtgccaagttcaggtgttggtggttttgcaccaatgcctaagaaaccaagtgttgcgagttctaagatggcattggaaatgcccattgtcatttgcacaattaaaggggctaaacagtttggtaaaatcacaataaacatgaggcgtaaaatacctgcccctgccactttagatgaagtcacataatcacgatttttttcattcatcatcgctgctcgagttaaacgcacatagctaggaatcgataccacggcgatcgctaaagtggcattggcgagtgatggctctaaaatagagacgactacaatcgtcaaaagtaagtttggaatcgcgagcataatatcaattaggcgaatgataattgtatctagcacgccgccataatagccagaaattaagccaagactggtgccgaaggcacaggatagcaatacaatgacaaatcccgcaaagacggaaattcgcgttccataaataatacgcgaaagaatatctcgcccaatatcgtctgtgccgagtaaataagcaggattaccgccctcataccaagcagggggaagtaaaagtgcggtacgattttgttctgttggatcaaaaggtgcaatataaggtgcgagaatgctgattaaggcaacaatcaaaataaaaattaaaccaattagcgcaccacgattttgtttaaagtaaaaccaaaattcttgtaagggtgtttttggcgcgaaagttaaaggcgtgtcagacataatttctcctacaattaatgacggatacgcggattgaccacaccgtaaagtaaatcgacggttaaattcaccacaataataatcgtcgcaataatcagtacagaaccttgcaacactggataatcacgggcttgaatggcatcaataatccattttccaatccccggccaagagaaaatagtttctgtgagaactgcaccagaaagcaattgacctacaattaacccgaccacagtgacaacaggaattaacgcattacgcaatgcgtgaacaataacaattcgagtatagcttaaaccttttgcctttgccgtgcgaatgtaatcttcacctaacacttccaacatcgcagagcgtgtcatacgcgtaataatggcgagaggaactgtgcctaagacgatggcaggaagaattaatgatttcaccgcattttcgaaggcaccagaaacacctgaaagccagctatcaataagcataaatcctgttggtgtatcgatccaaaattcattatctaaacgcccaccttgtggcaaaccgagttgtggcgaaacatataaaattaaaattaaaccccaccagaaaatcggcatagaataacctgtgagcgatgcagctgtaacggtgtgagaaatccaactgtctttttttactgcggcaatcgtgcctaaaattattccacctaataatgaccaaaataacgcaaaaaaagctaattcagcggtagcaggaaaaagcgtaaaaaattcagtaaggacaggttgttgagtgcggaacgatgcaccgaaatccccttgaattacattgccaatatagtggaaatattgctgataaagaggtaaatctaaacccaattggtgcatcatttgttgatgtacttctgccgttaagccgcgttcccccatcataatttccacaggatcaccgggaataaaatgcacaagggcaaaggtaataagagtaatggcaataaaagtagggatcaccattaagattcgtttgaatacaaatttaaacattccatcactcgtagataataaaagtgcggtaaaaattcaccgcacttttcaaagaaattaatcggtaaaaaatataatactcttgaattctaccgcactttttccagttttgccaaatgcgcaataagccatttaatgccttgcgcttggaacgctatttgtaaacgtgtgttattttcagatccttccacattaatcactgtgccgaaaccaaatttttcgtgtttaactttttgacccattttccattcattttcgaccgcactggtattcgacaatgaaccgacttttgctagggtcatcgcacgcgtgactgtccctcgtaaacgaatttcttggatacattctctcggtaattctgcgataaaccgtgatggcaaatggcgttcttctttggcatataatcgacggctttccgcataagagatggtcagttttttctgtgcgcgagtaataccgacataagctaaacgacgctcttcttctaaacgtccgggttcttcaaaagaacgaaaacttgggaataatccttcttctacgcccaccataaatacacgaggaaattctaagcctttcgcagagtgcaacgtcatcatttctacacaagattgatgcggcgaggcttgttcttctccagcttctaaggaagcgtgcgttaaaaaggcagtgagttcggtcatttcttccgcattatcaggtttgataaattcacgggttgcggtaactaattcttccaaattttcaatacgcacttcgcctttttcgcctttttcttgttgatacatttcatataagcccgaatgtttaatcacaaaatcagtttgtgcgaaaagcggcatttctgcggtatcaagttgtagtgaattaattaattcttggaaacgtaataaggctgttgaggctcgccctgccaacatattttcttgtgttgcgacttgtactgcttgccataaggtaatttggcgttcacgtgttaagttacgcaatatatctaaagtgcggtcgccaatgccacgggttggcgtattaattacacgctcaaaagccgcatcatcttgacgattattaatcaaacgaagataggctaacgcatctttaatttcttgacgttcgaagaaacgcataccgccataaatacgatatggaatttgacaacgaattaaggcttcttcaataacccgtgattggctattactacgataaagtacagcgcaatcatcaagttttccgccattttctacccaatcctgaatttgtgaagcgacaaattttgcttcgtctaattcattaaaggcagcatagatgcccacaggatcgcctttttcaccctctgtccataaatttttaccaagacgatcactattgtttgcaattaattcatttgcgctgtttaggatattggcggtagaacgatagttttgttcaaggagaattgtctcggctttgaaatctttcaagaatttttggatattttcaatttgtgcgccacgccaaccgtatatagattgatcatcatcgcccacaatcatgacttggcctgtttttccagcaagaattttgatccatttatattggattttattggtgtcttgaaattcatccaccaaaatatgctgaaaacgttgttgataacgttgcaaaattaatggttttttctcaaataattcatagacccgaattaataattcagcaaaatcgaccaaccctgcgcgatcgcaagtgtcttgatagatctgataaattttaatccattcacgttcttggcgatcattaaaatcttcaatatcatttggtcgcaagccttcatcttttttgttattgatgtaccaacaagcctgtttaggcggaaaagctttttcatcaaaattatgtaattttaataatcgtttaattaaacgaagttgatcttctgaatctaaaatttggaaatcttgtggcaatcccacatctaaatgatgagctcgcaacaaacgatgagcaatgctatggaaggtgccaatccacataccaaataattgatgttgtgcgtgtttggcaagggtagattgaatacgatgacgcatttctgctgcggctttattggtaaaggtcaccgccataatgctgccttcagaaatattttcgaccgcaattaaccaagcaatacggtgcgtcaatacacgcgttttgcccgagcctgcaccagctaacactaagtgattaccaagaggagcagctacggcttcgcgttgtttatcgttgagtccgtcaagtaattcagaaatatccatcataaactatctttaatctgtttaaatttacagttattatagtcccatctatcttgtgaaacaataagatttgtgagtatatcaaaagtagggtagaacattttaagaataatattaagcgggattctcctatatccttaaactcaacatcaaaaccatatgctttgaaagctatttttatactatttataaacaaacttttaattcgtttacctctcattcctaaaatgcaaggtttctcatttttccaaaaatacccatgatgaacaataatagcataggaatgttgtttaatgacttaatcaatacttgatttgctaggattcctgtaatgattttataaacatttgcttttctttctacttgcacgccattttacgcatagtcggtgattttgtccgaattaagttttaggttaaaaagttactcaaattcaatgttattcataattaatacaaataagaaagggtgagatatggtacaaaattccaaaaaatggttagcacaaaggaatgggagaagtgtgctatccaagtttcattatgatcactctctaaagtagaaaacgtcatatactaaattatatactgatcaaaaaataatatttccttctattactcaataccaatcaatttatgtgtttgtaaacttagctgccatttaggtttatttgaacgttgattcaattgaccaagtaaagtgatagtctcaagtaaattcattttcccatcaatttcacaaggtgaaagatagtaattctttgcttttattttttgctcgatcaattcacaaaatgatggcatattactgtccattacaatacgtacttcatttgcaaatggaatgcaacgcttttcatacttatgagcataaaggctcttaggactcgtcgcaatataatctatttgtgcaggaattgcttttagaccattggtttcaattgcaagaaaatagccatctgatttaaattgctcaagtaagtattcaatttttggtacaattgttggctcaccacctgtgatgataatattctttgacgaaaatgaccgcactttttctagaatttgtgatacagaccagcgtttaaaattattataaggtgtatcacaccaaggacagtctagattgcatttaccaaatcgtacaaaaacacttggcattcccgtattgaagccctccccttgcagactttcaaaaatttcgactatgttaaagttcggttcaaaatcatgatatttttccatcaacatttactcctgatactcgcaaaatgaagttggggtttcccataaacgaatggatgatatggacagttgttcatcatgttttaaacgattaaaaataaaacgagctatttcttctgccgtagttctaaagggaacaccaaaagtttttgagtttaacttttgcaatagagtggcaatttggctttctcgctcattggtttgatcataaataaaggcgtgatccatcggatctaaaataacttttttcacaatagactttagatctgaaaaatcaatgaccattgctttttttgcacctgattcatataagtcacccgaaatttcaacttgtaatttatatgtgtgtccatgtaaattttgacatttcccatcatgtccatctaataaatgtgccatgtcaaagctaaattctttggaaattttaaacattttttctacctttttgagtcaaatatttctttagacctttattgcgtaaaatacagcttgggcattttccgcatccaccttcgatgccttcatagcaagtgtgagtatgtttttgtacataatctaatacgcctaattcatcagcaagttgccaagtttgggctttagtgagatacattaatggtgttttgatattgaattgataatccatagctaaatttaatgtgacattcattgacttgataaacacatctcggcaatctggataaccgctgaaatctgtttcacatacgccagtgataatatcttgaatgccttggcctttcgcataaatcgctgcataaagtaaaaatagggcattgcgaccatcaacaaaagtgtttggcaattcactctctttttgctcaatatgcgcttgttcatccattaatgcattatgcgtgatagctttcataacagatgtatcaatcaaggtttgtttaatgccgagatcttgcgtaatggcgcgcgccttttctaactcaatagcatgacgctgcccatattgaaaggtaatggcttctatgttttctttgccgtattcagcaatagcttggaataaacaagtcgtggagtcttgtccacctgaaaagatgacaatcgctttacgatcgtggtttggattgaaaatattcatattttacctagttttttattgtaggaggtttgcgaactacggggggtattctagtggggaagttctattttagcaagacaagtgaaatatttcgttggatgtgaagtcgttgtgctacaattcgcaggtttttaatttagcaaaaaggtttacctatgaaaaaatggttgttgattatcgcaggcgcgttgattatttcagcttgcgcaaataaggatgtgtattttaacggtgcagaaggttcgcattcaggtgttaaatttgataaagattctcgccaatggggattaaatcaataaaaaagtgcggttataaagaagcttattttacattgtagataggcttttattatttagattttttagttttcgcacttattgcggttatcaataaaatttcataattttattttgattttaataattcaataatctcttttaatgccttaatttcatcatctttttgagctaataaggtatctttcattgtcagtaaactatttaatttttcattttcagctgttaatacttcattagtaccgaaatgactgttagttaagttataagaattatcaccacctaccgcaaagaaaattgatctatccttacaagtaatcaattcgcccatatcaatattaaacacattcgcaatttgctgtaatttatctaaattaatactgctttgtccacgttcaattttggcatatccattcggcgacatcgaaagtttttctgccatttcttcttgtgaccattgattgatttctctcattactcgaattttatcgtggacttccattttgtttccttaaagtgcggttttaggtagtggcagataagtttttgacactgttcgtttgtggtaaaaaactggagtgaagtataacatttacgagaaatttatccaatcttgaggacttttttatgaaaataacatttactagatcattattagcaacagccgtaatggtgggattaactgcttgtggttcaggtggtggtaatggtatgaataacaatacaactagtcaagttacaggaaaaacgggcgcaatgtatacagtttcattaactaatgataataaaatagggacggttacgaaaactccattaaataattctgatattaattctcttaatttagatagcgcatcaacacaacgtattaatgaagctatgaataaaatttcagaggaatttaaatcaaaaacaggattagatgttgttactggagctgcaattgtttctaatggagaaaagtttcatattatctataacggtaatccaacagaaacaatgccagtacaaggttcaatccattataaaggttctgccgttttagggggatggtctgcggatgctccactctcaattgaaaaaggaacctctcaatttgatgtgaattttgctgatagcaccttaactggaacattaaatgttccgaatttttctcttgtttccatatcagctagcgtgtcaggaaacagtttttctggtcgagcaacatcccctgatgctcctgatggtgctgtcgtagagggaaaattttatggaaaagatgctcttggtttatcaggaatgttaaaaacaaatacatttacagataattttggtggagcggggatctttagtgctattgatgaaacgaaaataacacaataatgttatttattcagataatgaaaaatataatagtctttttatcactatgtttaattagttctaatatttatagtgaaacgagagcaattaattataattcatctgatataaaacaaaatccagcaataatagaaatgttattgctggatgccattgatgaagacaatattaatggaatagaatcattattgatagattaccagagattacataatgctagacttgatctaattgctattgccaaatttaaaattggtcaataccagtttaataattatcaaaataataaatctttaaaaaattttcaattagctaaattaatatttaattttccgccacttcatttttacatcatagaacagtacctatccgttttaaaagcaagagaaagttggcaattttccttaggtgggaattatttacaaactaagaacgtgaataatacgtctaatgagcgacatattgaaaacacaggctttgtgaaaaatgaggatatgttgccacaatcggcacatggctttgcttattattttgatgctcagaaaaattggaacatagcaggttcgcattatctgcattttgcgaataacctatatggcaaaaattattggaataatcataattatgatgaaatcactaaccgcacttatttaggctatcaatatcaaaatgctaaatataaattggtattaaaaccgttttatgagcgtcaatggttgggcggtcatcgttataactgggcaaatggtgctagagcggaatatagtttaaatctttcaaaaaattggcagatttcaaccgcacttgaattaagccagctacgttattttacccaagcagatcgtaatggaacaattaagttagcttctgtaacctttatttggcagccatctgataaaggttattattacttaggttcggattttattcgcgaaaccacgcgtataaaacaatatagcaatgatatgaaagcattacgattaggttggcggcaaaattggggttatgcaattgcaagtcaaattaatggctctattgcgttgaaacagtataaggattttgcttctcttggtgggattttgccgttaaataaaattcgtcgagataaaatctattctctgaatttaactttatggaaacaagattggcagtatttaggttttacgccgaaagtgcaattccgttggaaaaaacaagaaagtaaccttccttcaatgttttcttattcagaaaaatatgtgcagatgttagtagaaaaggatttttaactccagaaaaacagaagcggtcgagtttgcaaaatcttttacaacttcgaccgctttagagtaatagattatcctactttcacaatccagccttcaggtgcttcgatatcaccgaattggatgcctgttaattcatcataaagacgacgggtaacagggcctacttcagtttctgaatagaatacgtggaattttccgttgtgttgaatgccgcccactggagtaatcaccgccgctgtaccgcacgcaccagcttctacgaattgatcgagttgatcgatatacacatcgccttcaatagcttccatacctaaacgctcttttgcgatatgtaaaagagagtatttagtgatacttggtaaaatagattctgattttggtgtgatgaatttattgtcttttgtgatcccaaaaaagtttgccgcaccgacttcttcaattttggtgtgagtttttggatctaaatagattgcatccgcaaatttacgttctggcgtaccttgttctgcggctaattcgtgtggaagtaagcttgctgcgtagttcccgcccactttcacaccaccagtgcccattggtgcagcacggtcgtaatcggtcgtgataaagtttgatggagccaaaccacctttgaagtaagcacccactgggcaacaaaaaacagagaaaataaactctggtgccgttttcacgccgatattttcgcccacgccaattaagaatggacgtaagtataaggttgcaccagaaccgtaaggacccaaccaatcttggttagctttaaccacttctttacatgcacgcacgaataattcagttggtacgcgtggcattaaaagacggtctgcggtacgttgcatacgctctgcatttgcttgcgggcggaataagttgattgaaccatctttgcaacggtaagcctttaatccttcaaaacattgctgaccgtagtgaagagcggttgaaccttcgtgaatatgtaatgtgctatctgtagtgagttttccttcgtcccatttgccatctttccagtgagcgatgaagcggtaatctgttttaatataactaaaaccaaggttattccagtctaagtctttcattttacttccttaatattattttttgaatgaaatttcgcttaatctacaccattcctgaagtgatttaaataataaattctcgaaatgatgcaatttttagccaactaaaaaggaataatgaaattttggaaactgggcaggaaataacgatatagttatgctaaaatcgggatgaaaaaaacgccactcaatgagagcagcgtttaaccaaatcggtttaataatatacaggaagtaaatgagtaacaaattgttactcaagttcggtttcccgaactgtatgcaaacacaacatcatacttaagtctgaaactcattaactagtaaggaattaccaatcattaagtatggttgtattgtaaggaaaagggtaggaaaggacaagtgacgtttttttatttgaggtattagaaaaactaatttgaaataaatcttgtccattatagacgaaaattttataaatggaaatacttatgtataaacgtttgccaccattgaattccctaaaatcttttgagtcggctgctcgttatttaagttttactaaagcagcagatgagctttgtgttacacaggcggcggttagtcatcaaattaaattattagaagaatttttagggattgaattatttaagcgaaagaatcgttctttagaattaacggagcttggtaaagcttattttgttgatattaataaaattctgcgtcgcttaaatgaagcaacagagcgattgttgatgttaaaagcagatcctcacttaaacattagtgtgccacaaacttttggtatccaatggttagtgccacatttaagtgaatttaatcagctttatccgcaaattgaggttcgtttaacaggcgtggatcaagatgaaggtttgttaaataaagaaattgatcttgctatttattatggtttgggaaattggcagaatcttcaagtagatcgtcttggtgaagaaaatttattgattttagcctcacctgaattgctagccgaaaatccaattattcagcctgaagatttaaaaaaacacacattaattcacattcatacctgtgataattggcaaacgatggcaaatcatttacagttagatgatttaaatattcagcaaggaccgttatttagccatacatttatggcgttacaggcggctattcacgggcagggcattgtattagctaatcgcttattagccttgcaagaaattgaaaatggatcattgcaagcagtgttgccgactaatttgcctgatccaaaatcattttatgtggtcaatcatcttgatcgccttgatgaccaaaaaattcaagcattccgtcagtggattattaactcaattaaacaagaagaaaatgaataaactcgcattatattgtcgcccaggttttgagaaagaagtcgccgcagagattaccgatcaagcaagtcatttaggtgtatttggttttgctcgagtgcaagataattcgggctacgtgatttttgaatgttatcaacctgatgaggcagatcgccttgcccgagacattccttttaatcgtttgatttttgctcgtcagatgatagttatttccgatttattggaagatttagatcccgctgatcgtattagtcccatcgtggcggcgtttgaagaattatcacaacaagttaattttgctcaatctagcgagctttttgtagaaactgcagatacaaatgaagcgaaggagctttccactttttgtcgtaaatttaccgtgcctttacgtcaggcattgaaaaaacaaggttggctttcggcaaaggcgagtcaaaagtgcggtcaatttttacattgtttttttgtaaaaccgaattgctgttatgtgggatattcttatgtggataatcattccccccattttatgggaatccctcgtttaaaatttcctgcagatgcaccgagtcgctccacgttaaaactagaagaagctattttgacttttattccgcgtaaagaagagaataaacgtttaaatgaaaatatgattggcgttgatttaggggcttgccctggtggttggacgtatcaattagtcaaacgcggtttatttgtttatgctgttgatcacggaaaaatggcggcgagtttgcatgatacggggcgcattgaacattgcgcggaagatggttttaaatttcagcctcccaaaaggaaaaaagtggattggttagtctgtgatatggtggaacaaccaagtcgtatttctttattgattggtaaatggttgttgaatggttggtgccgagaaaccatcttcaatttaaaattacccatgaaaaaacgttatcaagaagtgatattatgtttagaaaacttggctgttatgttggctgagcagaatttaaattttgagattcaagcaaaacatttatatcacgatcgtgaagaaatcacggttcatatagcattaaaaccttgagtgaactgttttcataaccaaaaaggacgtcgcgaatgaatttacacgaataccaagcaaaacaactatttgagcattatggattacccgtaaaaaatggggcggtctgccaatctgttgatgaagtagatttggtactggctcaacttgcaggcggtaagtgggcagcgaaatgccaagttcatgcgggtgggcgtggtaaagcgggtggcgttaaattagtgcacgatgtagaggaagcaagatcttttgcagaaaaatggctaggacaacgtttagtcacttttcaaacggataaattgggtcagccagtaaaccagatttattttgaagaaacttgcgatattgataaagaattttacttaagtgcggttgttgatcgcgcctctcaaaaagttatgtttattgcttctcctgctggtggaatgaatattgaagaagttgcgcaaaattcaccgcacttactccataaagtcgagattgatcctttatttggaggattgccttatcaaggccgtgaattggcgtttaaattagggttaagtggtacgcaaaacaaacagtttaccgatatctttatgggcttatctcgtttgtttttagaaaaagatttatctttactggaagtcaatccacttgttctcactcaacaaggcaatttggtttgtctcgacgccaaaatatctgtcgatgataacgctttatttcgccataaagatttattggcactgcaagatttaactcaaaatgatgctcgtgaagcagaagctgaaaaattccagttaaactatgtggctttagagggcgatattggttgtatggtaaacggggctgggcttgcaatgggcaccatggatattgtgaaactctatggtgggaagcctgcgaattttcttgatgtgggtggtggtgcaacgcaagagcgggttgctgaagcgttcaaaatcattttaaccgatccttccgttaaagtgattttagtgaatatttttggtggcattgttcgttgtgatttgattgctgaaggcgtgattgctgcagtaaatgaagtgggcgtgagagtgcctgtggttgtgcgattagaaggaacgaatgctgaaatcggtcgccaaattttagtgcaaagtgacgttaatattcttaccgcacagagtttacaacaagccgcagaattagccgtgaatgcagcaaaaggagaacactaatggcgattttaattgataaaaataccaaagtgatttgccaaggttttactggtggacaagggacttttcattctgaacaagcattggcctacggaacgcaattagttggtggcgtatcgccaaataaaggtggaaccactcatcttggtttacctgtatttaatacagttcgtgaagctgtcgaaaatacgggggcaacagcgacagtcatttatgtgccagcatcattttgtaaagatgccataattgaagccattgatgcagggattcagttaattgtctgtattactgagggtattcctacattggatatgcttaaagtgaaacagaaattaaatgaaacgggcgtagtaatgattgggccaaattgcccaggtgtgattacgcctgatgaatgtaaaatcggcattatgcccgctcacatacataaaaaaggtaaagtggggattgtttctcgttctggaactttaacttatgaagcggtaaaacaaactacagatgaaggctttggacaatcgacttgtgtgggtatcggtggtgatcccattccgggttctagttttattgatattctcgaaagatttcaacaagatcccgaaacagaagccattgtgatgattggcgagattggcggctcggcagaggaagaagcagcaatcttcattaaagataatgtcactaaaccagtggttgcgtatattgcgggtatcactgcaccaaaaggaaaacggatggggcatgcgggagccattattagcggcggaaaaggtactgcagtagaaaaaattgcagcgttagaagccgctggtgtgacctgtgtaaaaagcctcgctgaaattggtgaagccttgagaaagctattaaaatcatctaaaaattaaccgcactttagttttctaaagcgtagattgactttctacgcctttatttttatatgctcgccattataaagtgaggggaaaattgctataatcagcgcacattttttaaggaagaaacacatgagccaatttttctatatccaccctgaaaatccacaagcgcgcttgattaatcaagccgtagagattttacaaaaaggcggtgtgattgtgtatccaacggattcgggatatgccttgggctgtatgatgggcgataaacacgcaatggatcgcattgtagcaattcgtaaattgcctgaaggacataattttaccttggtgtgtagcgatttgtcggaactttcaacttatgcaacggtaaataataccgcttatcgtttgattaaaaataatacgccagggcgttatacttttattcttacagcaacgaaagaattacctcgccgtttaatgacatcaaaacgtaaaaccattggtttacgcgtaccagataataaaattgctttagatttgctttcagccttaggcgagccgattttatcttgttcgttaatgttgccgaatgaagaacatactacgcaatccgatcctgaagaaattcgtgatcgtttagaacatcaagtggatttaattattcatggtggatatttagggcaagagcctacaacagtggtagatttaacggaagaatcgccagtgattttacgcgaaggaagtggaagtactgctccttttatttaacttatagacgcttgtgaaagcgacctttccattattcaaggaaaacaatgaaacctagtcaaaaacaaactcaaagacaaccgcacttttccaaagattcagcaaagaaacgtgatttttcagctaaaaatgacagacgttcagtatctcgtactgctcgcatagaaacagcaaatacgaaaaaaagtgcggttaattctgataacaaatttttagcgaagccaaaagcgaaacctgttgtaagagcctcgaatcaaccgaaagcagagggcgaaaaattacagaaagttttagcgcgtgctgggcaaggctctcgtcgtgaaattgaaacgatgattgccgcaggcagagtgagcgtagagggtaaaattgcgactttaggcgatcgtattgacgtacattctggcgtgaaagtgcgtattgatggtcaaatcattaatcttagccacgcacaaaaagaaatttgccgtgtattaatgtattacaaacctgaaggcgaactctgtacacgtagcgacccagaagggcgtgcgaccgtgtttgatcgtttgccgcgtttaacaggctctcgttggattgcggtggggcgtttagatattaatacatcgggtttattgctttttaccactgatggcgaattagcaaatcgtttaatgcacccaagccgtgaagttgaacgtgaatattctgtgcgtgtatttggtcaagttgatgatgcgatgttagcacgtttacgtaaaggcgttcagcttgaagatggtcctgctaattttaaagaaattaaatttacaggcggtgtgggtattaaccaatggtatgacgtaaccttgatggaaggacgtaaccgtgaggttcgtcgtttgtgggaatctcaagggattcaagttagccgcttgattcgtattcgttacggaaatatcaaactgatgaaaggtttgcctcgtggtggctgggaagaaatggatcttgaaaacgtcaattatttacgtgaattggtgggattacctgctgagactgaaacgaaattagatgtaaaacaggctagtcgtcgtccaaaatctgggcaaattcgtaaagcggtaaaacgttattcggagatgaacaaacgttataaaaaataaggacttttttatgaaaatgcatcaattgcgttatatcgttgagattgtaaaccaaaatttgaatgtcacagaagcggcaaatgcactttacacatcacagccgggtatcagtaaacaagttcgcctattagaagatgaattaggtctagaaatttttgagcgtcatggcaaacatataaaatcaattacaccagcagggaaaaagattatctcaattgcacgcgagttacttgttaaagcgcaaggtatccgtgccgttgccgatgaatatactcagccaaatcacggtgtattacgtattgcgacgacaaatactcaggcacgttatatgctgccaagcgtgattgaacgtttttctaaaaaatatcctgatgtgagcttgcatattcatcaaggttcgccaacacaaattcacgatgctttaatgtcaggtgaagtggatttggcaattaccactgaagcaccttatttatttgatgatttagttcagattccatgctattggtggaatcgtgctgtgattgtttcgccagaacatccgcttgccaaagtgaaagaattgaccattgaggaattaggcaaatacccacttgtgacttacacgtttggttttacgggtgtttctgatttagattacgcatttaatagtgcaggcattttaccaaatatagtttttacggctaccgatgctgatgttattaaaacttatgtgcgcttgggtttaggggtgggcattatggcatctatggcacatacggcattagatacggatcttgtgctaattgatgcaagccatttgttccgcccgagtatgacgaatattgcatttaaacatagcacgttcttacgtaattatatgtacgatttcatggaatatttttcaccgcacttaactcgtagtgtcgtagaaaaagccgagcgtttgcgtgataacaattcagtgaaaaaattatttgaaggcattgaattggaaacaagataacaatgtataaatgaagtgcggttgaaatttaataagaattttaaccgcacttgaaagattaaaacagatcgtgatatttcactaaatctttacgctgaatagcaaatacgcctagtccgccatttttaagttctacccattcaaatggtacatctggatattgctcaattaagctaatcatactattacccacttcacacactaacacgccattttcggttaagtaatctgatgcttgttttaaaatttgtttggtaatgtttaagccatcactgccagaacctaaggctaactctggttcaaaatggaattcttctggcatatcggcgagatcttcttcgtccacataaggtggattggtcacgataagatcgtatttttgtcccaaaatattttcaaataagtttgattgaatcgggaatacgcgatgctctaatttatggcgtgaaatattgatctctgcgacattaagtgcatcaaccgataaatctaccgcatctacttccgcattcgggaaagtataagcacaagcaatggcaatacaaccgctgcctgtgcatagatcgagaatatgatttggttcttgtgaaattaaatcttcaaatcgatcttgaattaaagcactaattggagaacgtggaataatggttcgttcatcgacataaaattcatggccgcagaaccaagcactattcgttaaatatgccacaggtacgcgttgttcgattcgggttaatacaagttgaactaaggtttctttttcagatggggttaatcgactgttaaataattcggtaggtaaatcaatgggtaaatgtaagccaattaaaacgagttgcaggctttcatcccaaggattatcgtgcccttgcccgaagtaaatatcagatcgattgagaatgctatacgtccaacgcagaaaatcttggatggtttgcagttcgtttgcaacattatcttccaagatagttgcaactaattcttggttatgtgaagtttccatcgcatttctccataaaagtgagtagaaaagttagcataaaattcggtatgaaaatttggcgtagttataccacagatgagaatgtagaactatgatatgatacgcaaaatttgaaattaatgagaaaaaatgcaagacgaatttgatttattccgtgcggaaaccaaaggtattaagccaattaaacaagatacttttgttgccccccgccaaaaacgtgatcagaaaaaaatagaattgaaagaattacgagcgaaagaagatacattgttctatttttctgatgaatatgagccattactgaatgagcatgatggtgttgtgaaatatttacgtgatggggaagattcccatttattaaaacaacttcgtcgtggagatttttcgccagaattgtttttagatttacacggtttaacccgtgaacaagctaagcaagaattagccgcacttttactggcttgtgaaaatgagcatgtagattgtgccagtatcatgacgggctatggcacctttacattgaaaaaacaaattccacgttggctagtacaacatcctaaagtgcgggcattacatcaagcaccaagggagtggggcggtgaagccgcaattttgattttagtcgatttgtaaaaaacgttataaaaaatactgcacttttactgctagggcaaagtgcggtattttcttttatgtttttacttgaattattgtgttgcttgaattgcggttaaggcaattgtgtacacaatatcatcaactaaggcaccacgagataagtcattgactggtttgcgcataccttgaagcattgggccaatagacactaaatctgcagaacgttgtactgctttgtaagtagtgttacccgtatttaagtcagggaatacaaataccgttgctttacctgctactggtgaatttggtgctttagagcgagccacatcttccatcactgccgcatcgtattgtaatgggccatcgattaataaatcagggcgtttttctttcgcaatacgagttgcttctttcactttttctacatcagcaccgctaccagatgtacccgttgagtaagaaatcattgcgacttttggatcaataccaaatgcttttgcagaatccgcagattgaattgcgatttctgcaagttgttctgctgttggatctgggtttaccgcacagtcaccataaacaagcacttgatctggtaatagcataaagaagatagaagaaacaatcgaactacccggtgcagttttgatgatttgcattggtgggcgaatggtgtttgcagtcgtgtggacagcgccagatactaaaccatccacttcatttgcttctaacatcatggtgccaagtaccacagtgtcttctaattgctcacgagccgcagtttcggtcataccttttgctttacgtaattcaactaaacgatcaacatagttttcacgaacgtcagcaggattgatgattgtaatacctttacctaatttaacaccttgtgcttctgcaactcgttgaacggatgcaggatctgctaaaagcacacattccgcaatgccacgttctgcacaaagtacggctgctttgattgtacgaggttcatcgccttcaggaagcacaatacgttttttcgccgcacgagcaagttcagttaattggaaacggaatgcaggtggggataagcgaggtaaacggctggaatctgcaactaaattattgataaagtcagcattaaagtgttggctaatgtattgtttaatattttcaatacgttctttatcatcaacaggtacttccagattaaaactttgtaaacttaatgcagtttgccaagtattgccttcaatacggaagatcggtaatttcgctttttcaaaagttggacggcaaagtttattaatttgagcatcaattttgtagccgccagttaataagagaccgccgatttcaataccatttgacgctgcaagagcggctgctacaagcacatctggacgatctgctgaagcgactaataagctgcctgcacggaaatgctcaaccatatttggtaaacttcttgcacagaaagtgataccacgaatacggcgattgatttctccttcattaatgattgatgcacctaaatgtttgactaagtcgattgctcgtgtcgcgattaaatttgcattccaaggcacacaagctaataacttgatggcactacctgcaaataatttgtttacttctgtttcgctaatatgattgtgttggaatgaatcaaaaatttcagcaagatctggacgagtacgacctgattcatcaacaggtgcattgaatttgtttacaacaacacctaaaagatttggattgtttttaccaccaaatagagaggctgcagcttctacgcgatcttttaattcggttggcgtttcagttgcaggtgctgcaactaatacgatttccgcatctaatgcttgtgcaatttcatagttgatactgtttgcgtaaccgtgttttcttgtgggtattaagccttcaactacaacgatgtcattatttttggttaattgttggtggttagctacaattttttctaacaatacgtcagactgattttgaccaattaatgattctgccacgcttaacataaaaggttcggcagtttcaaggctagtgctagtgcgaataatagaagttgtgcgatccaatttatcttcgccagtgcttggttgagaaactggtttcataaaagcaacttttgtgcctttttgttcgagagagtggattaatccaagactaatgctagttaaacccacgcctgtacttacagggataagaataatcgtgcgagacatagttaaaccttaatatgtatattttataaataaaaactgccgaaaaattcggcagcttgttgttaaattagaaacaaagttttgcggtatcttgtgcgataaccaattcttcgttagttggaagaacaattgctttaaatgcggaatcatcagtggtgattacaccatctttaccaaaacgtgtggcaagatttcgttcgttatcgattttaatgccgaataattttaagtgatttaaggctaattcacgaacgtgcgctgagttttcgccaataccaccagtgaatgcaattgcatctaagtgatcatcgctcaacacagccatataagcaccaatgtatttcgctaaacgatagctataaacatttaaagcgcgttttgtttctggtttagattcatcatcgtagttatcttcagcataacggcagtcgcttgttacttcagttaaacctaaaagacccgattttttcactaaagtctcttcgatttgatccatagacatacctagtgttttgtataggtagaatacgattgcggggtcaatatcgccacaacgcgtacccattactaaaccttctagcggagttaagcccattgaagtatcaatacattgaccgttacgcacaacagaaacagaaccaccattacctaagtgacaaataatagcatttacttgatctgcaggtttgcctacatattcagcgacttcacgagaaacgaagtagtgacttgtgccgtgtgcaccatagcgacgtacgccgtgctctttatataaagagtatggaagggcataaaggaaggcttcttcaggcatagtttggtggaatgctgtatcaaaaactaccacgtttttatcttttaagtgtgggaatgccttgaatgcttcgcgaataccaattaagtgagcagggttgtgaagtggcgcaaattgtgcagcatcttcaattcctttaacaacttcatctgttacgatgacagattgagtgtatttttcgccaccgtgaacgatacgatgaccaattgccgcgatagaatttttaagctcatcattcagaatgttagatgcgataaaattaagtgcttcagtatgcgctgcacctgcgcctaaatctgcgttacctttctctccattgagtttccatttgatacgtgcttctggtaagaaaaatgcttcggctaagccagataatttttcttcccctgttgctggatcaagaattgcaaatttgagtgaagaactaccacagttaaggataagaacaagttttgacataggaaccctatatttgattgaggttaatagaaatccatcatctaagatggtttgaaaaatcagacatagaatacaccttttgatgaataaaataaattcatcggtaaggaaaaaatacaaactttatcgtattttttgaaaaattaaactatttttactaaaaatagacttaaaatagcgtatgataagtgcggtcaatttttgaggtgtttttatggcatttttttccattttaaaacagggacaaatttatcttaatacttggccgctggaggcgaagttaggcattattttccctgaaaaccgtattatgaaagccacgagttttgcacaaaaatttatgccttttgttgctgtgtttgcaattttgtggcagcagttttatgcaaaaaatgatttgatggcattttctatcgcaattttgaccgcactttttgccttgcttattccttttcaaggtctttattggcttggtaagcgtgccaatacgccgttagaaaatcaaagtgcggtatggttttacgatatttgcgaacgcttaaaacaactacatgaacccttgccttttgtgcaagaaaaaccgacataccaacatttagcagaagtcttaaagaaagctcaaagtaaatttgaacgtgctttttggcaggaaatttagtttacgcaaacgttttctttttggctttatttttgtagaatagctcggtcgttttaaacggccgtttttcattgagagattttttaatgatcgattacattattattggcattatcgctttttccattcttgttagtttattacgcggttttgttcgcgaagtgctttcactcggtagctgggttgtggcatttattgtagcaagtcagttctatccttatcttgctgcttatcttacgcaaattgaatcaatgtatattcgtaatggaactgcaatcgccattttgtttgttctgactttaattgtgggtgccatagtaaattatgtgattagtcaattagtggataagacgggtttaagcggaactgatcgcgtattaggtgcagctttcggtttagtgcgtggtgcgctgattgtggctgcgttgttattttttatggatacttttaccaattttgaacaaactgattggtggaaagaatctcaattaataccgcactttggttttattattgaatggttctttcaacaacttcaggcgagttcaagttttttaactccaacgcttaatcaataaggaacacaaaatgtgtggtattgtcggtattgttagccaaagtccggttaatgaatctatttatgcagcattaacccttttgcaacatcgtggacaagatgcggcaggtattgtaacggttgatgatgaaaaccgttttcgcttacgtaaagctaatggtttagtcagtgatgtgttccatcaagaacatatgctacgcttgcaaggaaatgctggattggggcatgttcgctatcctacagcggggagttctagcgtctcagaggcacagcctttttatgtgaattctccctatggtgtcactttggtgcataacggcaacttaaccaactcagtggagttaaaagaaaaggtctttaaaacagctcgccgccatgtaaacacgaattcagattccgaacttcttcttaatattctcgctaaccatctcgatcacattcctcaagatcagctcgatccacaagatattttctatgccgttcgtaaaactcataaggatgttcgtggtgcttatgcttgtttagcgatgattattgggcatggcatggttgcgtttcgtgatccttttggcattcgtcctttggtgttgggtaaacgcgaagaaaatggcaaaactgattatatgtttgcctctgaaacagtggctttagatattgtaggttttgactttgttcgcgatattgccccaggtgaagccgtttatgtgacatttaatggcgagctttattcgcagcaatgcgccgaaagtgcggtgctaaatccttgtatttttgagtatgtttattttgcacgtccagattcaacgattgatggcgtctcggtttatgctgcgcgtgttcacatgggcgaaaaactcgggcaaaaaattgcaaaagaatgggcggatgaaattgataatattgatgtggtcattcctattcctgaaacttcaacagatattgcgttacaaatagctcgtgttctagggaagccttatcgccaaggatttgtgaaaaatcgctatgttggccgtacctttattatgccaggacaagcacagcgtattagttctgttcgtcgcaaattgaataccattaaagctgaatttaaagataaaaacgtgttattggtggacgattctattgttcgaggtacaacctctgagcaaattgttgaaatggctcgctcagctggtgcgaagaaaatttacttcgcctctgctgccccagaaattcgttatccgaatgtatatggtattgatatgccgagtcgtgatgaactgatcgcttatggacgaaatgttgaggaaattgcacatttgatcggcgtagacaaattaattttccaagatctgaccgcacttactgaatctgttcaattggaaaatccagccattcaaggttttgattgttctgttttcacaggcgaatatattacaggcgatattagccctgaatatcttaataaaatcgcaactcaacgcaatgatagtgcaaagaaaaaacgagaaaaacaagcatccaatcttgaaatttacaatgaacaataaatgctaggcatttagagggataaaaatcatcgtattaaaagtgcggtgatttttttatttgttttttaggatgtcttttagatagttttcgcaatcagcatattgaaattggaatcctgctttgagtaatttttcaggtacaacattttgactttcgagtaatagatttgctcgctcgccaagaatgaaatgtaatagccattttggaatggttgcaaaagcaggacgttttaatagttgagctaaagtgcggttaaatttatgctgttttatagacttgggggcagcgaagttaaacgctcctctgcattctgaatgatcgagtaaaaataaaatgccgtttaccatatcttccaaagcaatccaagggaaatattgctctcccttgcccagtttaccgccaagtccccatttgtataaaggcaacattttagcaagtgcgccaccttttgtagaaaataccatacctgttctaatcaaacaaactctcgcattagcttgtcgcgcgatattttcccaatcttggcataattgtgcggtgaaggtttttgcagttttgcttgtttcggtaattttttgttcgtcttgatcgccgtaaattcctgttgctgaacctgatataaaaatagggtattgctgatactgattgatgaattcaatcagttgagtagtgaggcttaaacgactttctcgtaaaatagatttctggtttttcgaccaaactttatgaaaaattggctcgccagcaagattgatgatggcatcaaactgttcttgtgaattaagttgggaaagtgcggtaataaatttgatgtttttgtgctttgagagagtgtgcggcaaacttgagcgcgttaagatcgtcacttgttcattgcgtaaacagagttgttcgacaagtgctttgccgataagtcctgttcctcccgttaatagaatattcattacaatgcgttttcaaataaacgttggatattttgcaataattcgtcgataggtttatcgtttgtaggcgtgacaaaaatagtatcatcgcctgcgatagtacctaaaatgccttctgattttccaatggaatcaagtaatcgtgcaattaattgagcagcaccgggcgtcgtttttattatgattaacatcgcattgtgatcaacatctaagacaagattttttaatggactactggtattgggaacacttaattcatttggtaagcaatagaccatttccattttggtattacgggtgcgaaccgcgccaaatttgctgagcattcttgatatttttgattgattaataccagtaaagccttgtttttttaaggcatcgacaatttcactttgagaaccaaagcgttcttggttgagtaattctttaaaagcgcgagttaaattctcagtcatctttatttttcaatagtcaaaatttgcataagaattgcataaaaattcactttcatcaactgaaatatgaataagaacgaagagaagaaaatatttatctcagaaatgtgaactagatcatagaatgatatttctcttatttgtaattgtaagatgaacattttaaaatcagnnnnncattccattcattaattaattaatgaatgaatgnnnnncccaggtgttgcagtggatgtgagccatattccaactgcagtgaatgtaaaaggtttttctggtgaagatccaactccagcacttgaaggtgcggatgttgtattaatttctgctggtgttgctcgtaaacctggtatggatcgttcagatttattcaatattaatgcaggtatcgtgcgtggtttaattgaaaaagtcgcggttacttgcccgaaagcctgtgttggtatcatcactaacccagtaaatactactgttgcgattgcggctgaagtgttgaaaaaagcaggtgtttacgacaaacgtaaattatttggcgtgacaactttagatgtgttgcgttctgaaacctttgtggctgaattaaaaggtttaaatgtttctcgtacgagcgttcctgttattggtggtcactcaggtgtgactattcttccattactttctcaagttcaatatgcaaaatggaatgaagatgaaatcgaaccattaacaaaacgtatccaaaatgcaggtacagaagtggtcaatgcaaaagcgggtggcggttctgcaaccctttcaatggcgcaagctgcagcacgttttgcgcgttctttagtgaaaggattaagtggcgagacagtggttgaatgtacttatgttgaaggtgatggcaaatatgctcgtttcttctctcagccagttcgtttaggtaaagaaggtgtagaagaaattttaccaattggcccattaagcaattttgaacaacaagctctagaaaatatgttgccgactttacgtgcagatattgaattaggtgaaaaatttattaatggttaatcattaaaaagtaaggggagcattagctccctttttcatgtgtcgataaaaaagccaccaaatggtggcttttgtttgtatctttattatttctgacgcattgctgggaataagataacatcacgaattgacggtgcatttgcataaagcattgctagacggtcgatacctaaaccttcacctgctgttggtggtaagccgtgttctagtgcaacaacaaagtcttcgtctttaaacatcgcttcatcatcgcccgcttctttcgcagtcacttgtgcatcaaaacgttcattttgatcttctgcatcatttaattctgagaaaccattaccgatttcacggccaccgataaagagttcaaaacgatctgttacatcaggattttcatcattacgacgtgcaagtggcgaaatttccgcaggatgagccattaagaaggttggttgaattaagtgatgttcagccacttcttcaaagattgcattgacaatgctgcctaagccccaagatttttgtacttcaatacctaagcgttctgccgtagcttttgcacgatcaaagtcatataaatcttcttttacgatacctttgtctgcaccatatttaatgnnnnncattccattcattaattaattaatgaatgaatgnnnnncatctaatgcattgtgatgggtcacgaaaggacgtgcagatgcaccgcctggaatcacttgtaacattggcgtttccacttccataaagcctttagaaatgaaatattcacgaatacccgcgacaactttagaacgaataataaaagtgcggcgagattcttcgttagaaattaaatctaaataacgttggcgatagcgaacttcttggtcggttaaaccatggaatttgtctggtaatggacgaagtgctttggttaaaagttgaacttcagttgttttgatggttaattcattggttttagttttgaaaagtgtacctttcactccaatgatatcgcctaaatcccagttacctacatcttcagcataaacaccttcaggcaaattatcgcgtgcaacgtaaagctggattttaccgctcatatcttgaatagtgataaacgtcgctttacccattgcacgacgagtcataatacgaccagcaacttgtacttcaatgcctttttcttttaagatttcaccgtcttctgcatcatattgattgtgcaaatcttgtgcgagagcatcacgacgaaacttgtttggaaatgcattaccttttgtacgtaatgcggctaatttttcacgacgaacgagcatttcgccattgagatctaattctttaacttcttgttctgacatattgtttacctttaattttaactttaaaaataccttaaaaaataaccgcacttttgggttatttcttatgatgggataagtaactcgtctttacttatcctgcaaatcatgattaaagcccagcttttaaactcgcttcaataaatcgatctaaatcaccgtctaatacggcttgcgtattacggttttccacgccagtacgcaaatctttaatgcgtgaatcgtctaatacataagagcgaatttggcttccccaaccaatgtcagatttattatcttccattgcttgcttatctgcattttttttctgtaattcaagctcatacaatttcgcttttaattgcttcatcgcttgatctttgttcttgtgctgtgaacggtcgttttgacattgcaccacaatgccacttggcatatgggtaattcgcaccgcactttcagttttgtttacgtgctgaccacctgcccctgatgcacgataaacatcaatacgtaaatcagcaggattgatttcaatatcaatatcgtcatcaatttcagggtagacaaatgctgcactgaatgatgtgtgacgacggttattggaatcaaatggacttttacgcactaaacgatgaatccccgtttctgttcgtaaccaaccaaaagcatattcaccgctcactttaatggttgctgatttcaatccagctacatcgccgtcagagacttccatcagttctgttttaaaacccttgctttcagcccaacggagatacatacgcagcaacatttctgtccaatcttgagcttccgtaccgccagagcctgcttgtaagtccacatagcaatcgcaagcatcatgttcgccactaaacattcgacggaactctaatttttcgagttgttgttcgagttcatttaattcagcaactgcttcattaaaggtgtcttcatcttctgcttcgatggcaagttctaataatccatcaacatcttctaaaccttgttctaaatttttgatggtatttacaacttgttctaaagaaacgcgttctttaccaagtgcttgggctttatctggatcattccaaacatctggctgttctaattccgcattgacttcttctaaacgctcaactttggcatcgaagtcaaagatacccccgaagcactgaagtgcggtcagataaatcgatgattttattttttacaggattgatttcaaacataataaattcactgtgtgataaattgtggaattatatgctattttctgatttttggatagtttgaccttgcagaaattagcaatctctctataattttagactttctcactcaagctaatttaggaacaaaaaatgaagaaaatttttaccgcacttttgtgcgtggctgcggctaatgcaatggcagatgatgcggcaattaaacgcaaattacagtcttttaatatatcaaatattgttattaaatcttcgccgatttcaggcattaaaacggctgttacggatcaaggtatactctatgtgagcgaagatggaaaatatctttttgaaggtaaactttatgaactcacaaaataatggccctgtgatgtcgcaggtaaaattttnnnnncattccattcattaattaattaatgaatgaatgnnnnnagaccgcacttttgaaatcaatgctcaatccaaatcaattatatggcattgatcaagcggtaaatttattagtggaagcttatcaacaacagcaaaaaatagtgattgttggggattttgatgtagatggtgcaactagcacagcattgagtgtgctggctttaagacaacttggtttttccgatgtggattatcttgtaccaaatcgatttgaacagggttatggcttgagtattcctgtggctgaaatggcgattgaaaagggtgttcagttattaatgacggtagataacggtgtttcatcttttgaaggcattgcatttttgaaagaaaaaggcattcgagttttagtcacggatcatcatttaccgcccgaaactttgccgccagccgatgccattgttaatcctaatttaagtcagtgtcatttcccttcaaaatccttagcaggcgttggtgtggcattttatttgatgctggcggtgcgcgcaaaatttcgtgaactcggtatttttactgcagaaacacaacctaattttactgacttgctcgatctagtggcactaggcaccatcgcagatgttgtgcctttagatcaaaataatcgtatccttgcttatcaaggtttaatgcggattcgtgcacggcgttgccgtcctggtattattgcgttggcagaagtggctaaccgtaatgttgaacaatttacctcaagtgatctcggtttttgtatcgggcctcgtttaaatgcggcagggcgtttagataatatgtcgattggggtggagcttttgctggcgaacgaaatgtcaaaagccagagaattagctttagatcttgacgaactcaaccaaacacgtaaagaaattgaagcaggtatgaagcttgaggcaataaaaatttgtcaaaatcttaccgcactttttaaagagttaccctatggtattacgctttatcagcccgattggcatcaaggcgtattaggcattgtttcatcaagggttaaggatcaatatcatcgtccagtgattgcctttacgcaagatagtgagggaattttgaaaggttctgctcgttctattgaggggttacatatgcgcgatgttttagaacgtattcattcgcaacatcctaatataattttaaaatttggcggacacgcaatggctgctgggttgagtattcgagaagaatattttgccgatttccaacatctttttaatcaaaccattgccgattggcttgatgaagaacatctgcaaggcataatttggacagatggcgaactgaattcaaatgaatttaatcttgaaacggcagagttgataaaatcggtaggcacttggggacaagggtttcctgagccttgttttgatggcgaatttaaaattttagaccagcgcgcgattgggcaaaataaaaatcatctaaaaatgttgctagaaccgaaacaaggtggggggttattagatgcgattgcgtttaatattgatacaagattgtatcctgatctttcaattaaacaggctcgtttagcctataaattagagattaacgaatttcgtggcaatcgtagcgtacaattattggtagattatattgagcctatagatgagtgatagaatgaaattaaaagggctgttggcattttgtttgctttttttatcgtcgtttgttttagcagaagtcaatcagaaagaattttcagtacaaaattctccgcacttgccatcacgggacacaatttattttgaagatggacgcgattatttttcttatcaagaacctattgaacaagcgtctcgagccgataaaaaaatacggattcaattcttttttgattatgattgtcgagtatgttcttcagcgcaggatattttagaactttatagccaaatacgcacacataaagttgtgttggaacaatatcctattgcaactgccgatagccagtttagcgcacgcattttttatactttgcaagcattaagtgcgggcgaattatctaatgttttattatttgaaacttcagaaaaatcccgttatacagaattgtctacatcaaataaaattcagcaatgggcagaagaacaagggttagataagccgttatttattcaaactgaaaattcacaaagcgtaaaagaacaaattcaaaatgcgattgaattgacggaagaatatggtgtttttacctatccttacgttgtcattggtggaaaatatgtactcactgcaagtacactttataatgatgattatagcgtagcagtgttagattttttggtaaataaaatagaacaggaacaaaaacaatgaaaataggaattgttggtgcaatggcacaagaagtcgaaattttaaaaaatttaatggctgatagaacggaaactcgagtagcaagtgcggtcatttttgaaggcaaaattaacggtaaaaatgttgcattattacaatcaggcattggcaaagtggcagctgccattggcacgacggcattattgcaattagccaagccagattttgtgatcaatactggctctgcaggtggggtagcaaaaggcttaaaagtgggggatattgtgatttctgatgaaacacgctatcacgatgcggatgtgaccgcttttggctatgaaaaagggcaattgcctgctaatcctgcggcatttttatcggacaaaaaattagcagatctcgctcaagaaattgcagaaaagcaagggcaatcagtaaaacgtggtttaatttgctctggcgatagttttattaatagtgaagacaaaattgcacaaataaaagcagacttcccgaatgtgacgggggttgaaatggaagccacagcgattgcacaagtttgctatgcgtttaatgtgccttttgtggtggttcgagcaatttctgatggcggcgatggtgaagctagtatgtcttttgaagagtttttaccattagcggcgaagcagtcttcggcgttagtgttggggatgattgacagactgtagtaataatcttttaataagataataaatgctaaaattaaaggcatagctattagctatgcctttttatatgagcctattagaatttatagtttaaactcagaatataagttcttccacgtgcaaagttataaagcacggttttatcttttcctccatcttcacaagcacttttattacaaattgaatcatttaaacttgaataataacgttgcgaagccgcgtcatttccagcatctaatggatcaacataacgtttatctaatagattttgtacttccgctttaataatcaaatctttgattggttcatagctgacgtgtaaatctaaaataatcggttgttttttaatctcttctgtctttttaatagcataataagttctgctgcccctagcattttgttcaaagtgagatccattgatatattcttcttcaattgtcgcacgtttactttttccataataacgagctgccatacctaaggttaattttttatcaaaccaacgtgtaccaagctctaatctaccgtagtcttttggtagcattgaaacacgagataagccataaccttgtttcaaaatatcttcttttgaagcattattcggacgtgggctggcatcggcataattggttggctgattagtacgttgataagcgtaagagacattcgcaaaaaaacgccccatatcataatttaactctaactccgccccgctttttttcacgataggttgataattttgatgtgcgatattaaagcgaaaaccattcgtggctgcccaatcaggtaccttaccatttctccaccaaacaccgtaaacattatggatatagtttttaataaagctacgataacctactaattttacgcctaatacatcgtcttgagtgaatagaccttttttataagtattaaagcctagttgataggtgtcagattgttcaggttttaatgccgtgtttactcctgcattagacacttgagagaaaaacatctcttgaatattcggcattctgtgagtacgtgaataagtgaaaaatggcataaagtaatcacttagctctgcacttaatgtggcggaatgattgaatgcctttttatgacctgatttatgcaaaatcggttccttaagtgttatattgtcatatccaacatactcaccattaaaggcataatgggtaaaattcacgctgtaatttaaatgataaatacctttagaaagtgcggtatcaaaatacactgttttaaatttttgcttgccagaaggttgtaaaattactgaacgttgtggtaataaaccttgtgagccagaatatcgccctttattactgagtgaatataagccttgatcgtgtgattcattcacataaaacaaacttaattcttctggaaaacggtttttactgtattcattggtaaaatagttaaaacctaatgtggtttttaaatcaatttcttttggcaacaagaaagtatggctgttgttaatatcaacaatatttgccacattttttgcgataagtttatctgccacttgccagccagcaaaaaaaccgcctttaggataaatagttttgccaatgttatgtgcagccattaaattaagatcaagatagctgttattattgaagttataattgacttggtaattacggttttcaattttgcgagaaccaattttattatcaagggtacgtatttgtgcccctagcgtatggtgatcatcgccatattcaaattttaataaatggctacgtgaacgagattgcaaactaccaggctcaattggtgcaacactatattgatctttattatcttcaaatgatctgttggtttcttcaattccatcagcacctttttgtaattctgtaatttctgatggatcttttttctctttaacaaattgttctaaaattttctttctttcttcattttcgtaaacatttctatagttgtagaattttgagtcaccatcttgttttatgtatacattacaattcgcatcagtgtagcgttcctctcttgctcccgtatatttatttgctgtgacaataggatcttgacttcctgaatattgaggcatatctaagttacaagaccaatgggctttagataaatcaggaatccactgtccagcagcatttaaaacataacctgcattacggaaataggcttctttttctttagcaagaatatcttgccctaatgatgctaatcgttctccgccaccaatacgataatcttgtgaaacttcacgttggctataaccatacaccacgcctacatagccaccattatcaagccattttctgccagcagctgtcgtcataaaattggatttagtggcattgctccctgtcattcctttcagaataatgccgaatggtttgtcatcggtaatcacatcattaacgcttaatgttctaaaattagcactgcctgctaacgcatttataccgcttgctcccgaaaagttacttttattaacatctacacctgcaataaaattaggatcgattgccgcaccaaattgagaacttccgcctgattgaccagagtctaaggctgtagaataaaaagtctgtgttacaccatcaaccatcgtattgacacgacctaatccattttcgccacgaatatttacagaaaccacacccgagcctttatcttgctgagtaaatgccccaggaatgctccgaatcacttggtcaatggtttgtgtttccttaaagacattttcacgcgtacttttggctttggcttcagtgaaaggttttttgtcatttgatatcactttttctacgacatcaatttgccctaatgtttcttcggcttgagcttgtgtaatcgttataccgatcgtattaattaggctaagtgtaattaaatttaattttatagctttcttcattatagttcctatttatttttgagaagtattacgattatccattttataagagggatttcaaggaatgatttaataaatttaatgaaaatacctaaaaaaataatgaaaaaaattaattttttagagagaaaacacgtttagaagatagagaaaaagaaagtttggtttttgcgaaatggataaattcattcgctaaatcaaccgcacttaaatgggttgaaaatcgtttttgatagtagaaatataaaagagaaaaataggaaatgaccgcaaaagtgcggtcatttttggcgtgaattttatagattataaaataaaggtactaagaacaacgcgccaagtgcggcaataataccgtaaacgatcatcggtataatggttttcttaataattgtgccttcttggtttgaaatatttaacacagaacttaccgctacaatgttattgatacataccatattccccattgccccaccgacagattgtaaagcaagaacaagtgcgacagaaatgcctgtggtttctgcggtagaaagttgaacactaccaaatgttaggttggatacggtatttgaacccgagaaaaacgatccaatcgcgcctaagaaagaggagaaaatagtccagttactaccagaaatttcagcaaaagttcgaccaataatttttaccatagaatgttcgccacccactaacattaggtttaccatcactaaggcaccaactaaggcaataaatggatttttagattgttgtaaacttgatacaaaaatctgtttaacatttgaactggaaattttaaagaaaggaatcgcaattagtactgtaatgacaaatggaatcaatgcaggtacgtaaagaagtttatagcttgatgaaacatttgagccaaaaatattttttaagctaaagattaaacctttactaatttcaaataatcctaacgaacctaatgtggttgagaaccaaatagttgcgtcattcatcattgctttgaatggtaattgatgaatacgagtcacaattaaaaatgcaataagtaaacctgtcgggaataatgctttaactacttgtcctgcacttaccgcattattatcaagggtatttgttacttttgctaaaccaatattgcgattagcagcccatacagaaataaataagccgattgcccccccaacgagtgatggaaattcgtaattgacttgagcaatcaagaaataaggtactacgcaacccagtacgctaatatagataaatacgatgtttttacgaatatcatcccaatttactaagatacgaagtgctaataatgggataataagtgcagcaatggagtgtataaatgctgtaatagacccaatttctaaaatcatatcttctgataattttaaagcaccaaaaccaaaccaagttggtgtacctaccgcaccaaaggatacgggaactgagttcataataagtgccaacatcgccacttttaatggatgaaaacctaatcccactaaaataggtgcagcaattgccgctggtgtaccaaaaccacttgctccctcgatcataaaagcaaacgcccaaccaataatcattaattgtgcaacgggatttggattaatatttcctagccattttcgcataatatttgttgcgcctgaaatttcagagaaacggttaaagagaatcgcaccaaaaattactgtaataggtgtttgtaccgcaataattgcagaaacaacatttgcactaatagtgacaatatctgtattaaagtgtaaaagatgaacacccataactaatgtcgcaatccaaggtaaggcaacataagaaggtagcgcgtttctttttaccataagataaatcagtaaaacgataggaaaaannnnncattccattcattaattaattaatgaatgaatgnnnnntttttcttgcaggaatggatgtgagccgtttaattcgcacgcaagaagtggcagatgctgcgtcaaaagtagcagtctttcaaaaagtgcggtcagctttattacaacttcagcaagattttgcgaaaaatgatggattaattgcggatggcagagatatgggaacggttgtattcccaaatgcacaagtaaaattatttttagatgcaagtgctgaagaacgtgcaaaaagacgctataaacagttgcaaaataaaggaataaatggtaactttgcgcagattttagccgagataaaagagcgtgattttcgtgatagaaatcgtgaagttgcgccgctaaaaccagcagatgatgctttattattggatagtacaaccttgagtattggtgaagtaatcgatcaggcgttagcttatattcaagaaaaggtatcagttttgatttaactgtttgttcaaggaagaataagcatttatcctcaaccccgcattttatggattttaatgtggatgttattaacttaaattaagaagattatttatatgtcagaatcttttgctcaactttttgaagaatcattaaaagtccttgaaactcgtcaaggttcaatcgttagcggtactgtagtagctatccaaaaaggctttgtgcttgttgatgcaggtttaaaatctgagtctgcaattccagttgctgaattcttaaatgcacaaggcgaactagaaatccaagttggcgatactgtaaatgttgcattagatgcagttgaagatggtttcggtgaaactaaactttctcgtgagaaagcggttcgtcacgaatcttggattgaattagaaaaagcttacgaagaaaaagcgaccgttatcggtttaatcaacggcaaagtgaaaggtggcttcacagttgagttaaacggtgttcgtgcattcttaccaggttctttagttgatactcgtccagcgcgtgaagcagatcacttacttggtaaagaattagaattcaaagtaatcaaattagatcaaaaacgtaacaacgttgttgtttctcgtcgtgcagtaattgaatctgaaaacagccaagaacgtgaacaagtattagaaaatcttgtggaaggttcagaagttaaaggtgtcgttaaaaacttaactgagtacggtgcattcgttgatcttggtggtgttgatggtttattacacatcacagatatggcttggaaacgtgttaaacacccaagtgaaatcgtaaatgttggcgatgaagttactgttaaagtattaaaattcgataaagatcgtactcgtgtatctttaggcttaaaacaattaggtcaagatccatgggcagcaattgctgaaaatcatccagtaaacagcaaattaacaggtaaagtaactaacttaactgactatggctgtttcgttgaaatcttagatggcgttgaaggtttagttcacgtttctgaaatggattggactaataaaaatatccacccatctaaagtggttagcttaggcgatactgtagaagtaatggtattagaaattgatgaagaacgtcgtcgtatttctttaggcttaaaacaatgtaaagctaacccttggactcagtttgctgatactcacaacaaaggcgataaagtaacgggtaaaatcaagtctatcactgatttcggtatcttcatcggtcttgaaggtggtatcgatggtttagttcacttatctgatatttcttggagtatttcaggcgaagaagctgttcgtcaatacaaaaaaggtgacgaagtgtcagctgttgtattagctgttgatgcagtaaaagaacgtatctctttaggtattaaacaacttgaagaagatccattcaataactttgtcgcaatcaataaaaaaggtgcggtagtatctgcaactgttgttgaagcggatgctaaaggtgctaaagttgaattagcaggtggtgttgaaggttatatccgttctgctgatttaacaagtgaagtagctgttggcgatgtcgttgaagcgaaatacactggagtagatcgtaaatctcgcattgttcacttatcagtgaaagcaaaagatcaagctgaagaagctgcggcagttgcaagtgtaaataacaaacaagaagatattgttattccaaatgcaatggctgaagcatttaaagcagctaaaggtgaataattaattcacgtaataaggctgggctgatgtccagccttatttgttaggagttattgctaatatatttgtgtaatttattatcaatagatcttaatttaagtaatattaaggaagtatagacgatgactaagtcagaacttatggaaaaattgtcagcaaaacagccaactttacctgcaaaagaaattgaaaatatggtaaaagatattttagagtttatttctcaatctcttgaaaatggtgatcgtgttgaagttcgaggttttggtagcttttctttacatcatcggcaaccacgtttgggaagaaatccgaaaacaggcgattcagtaaacttatcagctaagtctgttccatattttaaagcgggtaaagaattaaaagctcgagtggatgttcaggcttaattgattaaaaagtttattttgggttacaaatattttaaaggaaatgaaatgattaaatatattttaggtattgtgatctttattgctattgtgttagttgcaattaccattggtgcgaataacgatcagattattacatttaattatattgtggcagaaagtcagtttcagctttcaagccttgttgctattttatttgggttaggtttaattcttggttggctaattactgcttttttctatattaagttaaaattaaaaaatatggcactagctcgtcaagtgaaacgtcagactttacaaatcaatgaattgacgactacgcgcgataaggtcgtttaatgatagaattactctttctattattgcctattgctgctgcctatggttggtatatggggcggcgtagtgcgaagaaagatcaagatgacataagcaataaactctcccgagattatgttacgggagtgaattttttactttccaatcaaactgataaagctgtagatttgtttttagatatgttgcaaaagcaagaaatcgaaaatgaaatcgaaagtcactcccaatttgaagcagaacttacacttggcaatctgtttcgttctcgaggcgaagttgatcgtgcattgcgcattcatcaagctttagatcttagtcctaattatacttttgaacaaaaattacttgcaaaacaacagcttgctcgagattttatggtggttggtttttttgaccgagctgagaatctttatattttactagtagatgaacctgagtttgcagaaaatgctttacagcaacttttagtgatttatcaaaagacaaaagaatggaaaaaagcagtcaatattgctgaaaaactcgctaaaataaagccacaagagaataatattgaacttgcgcaatgttattgtgaatattcacaaagtttagagcctgaaagtgcggttgaaaaacgcagtgttttacaaaaggctttgtcggtttctccgacttgtgttcgcgcttctttattgcttgcaaatttagcaatgcttgacggtcaatatcaacaagcagtaaaaatattagaaaatgttttggagcaaaatccagattatacgggtgaaattttgttacctttaaaacattgttacgaagaattaaatcagttagataattttgagttatttctaattcgtgcaggtcaaattattaataatgatgaagtagagctagctttggttaaattaattgaagaaaaagatggcaaatctgctgcgcaagctaagctttatcagcaactcacgaaaaagccaagtactttaattttccatcgttttatgcagtatcaaattgatgatgctgaagagggacggggaaaagaaagcttaattttattacataaaatggttggcgaaaggattaagcaaacatcgccttatcgttgtacaaattgtggttatcaaatccataagctattgtggaattgcccatcttgccgtcaatgggaaagtattaaaccagtttcaaatcaagaacataattaattgatactcagtgaggtaacactatgacaagtaaaattattgtggcattggattatgagaaagaagcagaggctcttgctttagttgatcaaattgatccaagtttgtgtcgattaaaagtgggtaaagaaatgtttactacacttggtattaattttgtaaaacaattacatcaacgtaattttgatgtttttttggatctgaaatatcacgatattccaaatacggtagcaagagcagttcgttctgctgctgatttaggcgtatggatggtggatttacacgcaagtggtggcttgcgtatgatggaagaagcgaagaaaattcttgaaccttatgggaaagatgcaccattgcttattgctgtgacggtattaaccagtatggaagacttggatttattacaaattgggattaatgcatcgccaatggaacaagttttacgcttagctcatttaacccaacgggcgggtttagatggtgtagtctgttcccctcaagaagttgaaattttacgtaacgcttgtggagaagactttaaattagtgaccccagggattcgtccaataggaactgattttggcgatcaaagacgtgtaatgacgcctactgcagcaattcgtgcaggttcagattatttagttattggacgcccaataactcaagcggataatcctgcggaggttctccgttctattaatttatctattgggtaatcataaatgtcagattctgttttagtgtattcaacagatgtgggtcgaattaaagaggaaaaggcttctgtagttcgcccaaaaggagacggtgttgtacgtattcaaaaacaaacgagtggtagaaaaggtgctggcgtatcagttataactggtttagatttatctgatgaggaattgaaaaaattagctgctgaattaaaaaaacgttgtggatgtggtggagcagttaaaaatggtattattgaaattcaaggggaaaaacgagatttgctcaagcaattattagagcaaaaagggtttaaagttaaattatcaggtggatgattaaaaaggcgcattagtgccttttttgttagagattcaaaatttttttgacgaaaggaatcgtaagatttcgttgagcttgtaatgatgctttatctagtagatcaagtgcttcaaatagagtatgcatatctcgtgctagtcgtgtaattaaaaaatttgcagtttcgtcagataattggaatcctcgttggtaagctgcgagttgtagtactttgattttttgttcgtctgttaatgaatttaattgataaatttccccccaagttaagcgagagtttaaatcaggcaatttgacagaaagtgcggaaggcgatttatctgcactaattagtaaaagcgttttcccacttgctttaattcgattaaacagatcaaaaatggctaattcccattcatcatttccgattacactttgtaaatcatctaagcatactaattcttgttgctctaaattttcaagaactgcggtagaaaaatattgagatttgctaaggggtacataaatagcagtacgttgattgattaaatattcgttactgaatgctctaagcagatgagtttttccagaacctttatttccccaaatatagaaaaacggttgttttaattcagatgaatttttgcgtaaagaatcgagcaataaaagattattatcgccgtaaaagttctctgatgtagcatcatcaatttgatgaataggtaaggggagttgcttattcaaatgtttatgtagtacagattaagtaagaaagggctaaatgataatttaaccctttgaaatggggcttattctacttcattttttgctttcggtaaaacaaggtttaagatgatagcaacaatcgcgcacaagctgataccttttattgatacgttacccacatctacaaacatattgccgataccaaatgtcattacgacagaaataatacacagattacgagcttcggtaacatcaacttttccgcgaattaaggtactcatgcccacaactgcgattgaaccgaaaacaagcatcataattccacccattacaatcgttggaatggttgataggaatgcgcctacttttccacagaatgaaatcgcaatagcccaaactgcagcccaagtcataatatttgggttaaagttgcgtgttagcatcacagcgccagtaacttccgcataagtcgtattaggcggaccaccaactaaagaggcagcagcggtagcgatgccatcgcctaataaagtgcggtgtaatcctggtttttttaaaaagtctttacctgttaccgagctaatcgccataataccgccaacgtgttctacggcgggggcaatagcaattggtaacatataaagaatggcttctaggttaaattcaggtgtcgttaatttgggcaaactgaaccaaggcgcatcaatcactggttggaaattaattaaacccagaaacaaacacaaaatatagcctgcggtaatgccgaacattattggaataagtttcatcaagcctttggcaaatactgccacagataaagtggtaagaagtgttaccattgaaactaatatagcgtcgttataagcataggcactgtttttgcctaaggacatatccaccgcaataggtgcaagccccatgccaatgataataattactggcccaacaaccactggtgggaaaaaacgttgtaatgcttctgctccccgtaattttactaaagtgctcaaggcgaaataaacaagaccagtgaacgctaaaccacccatcgtagtcgcaattccccaagtttgtacgccatattgaatgggtgcgataaaggcaaaagatgatgccaagaaaataggcacttgtttgcctgtgcaaaattggaagagtagggtgccaacgcctgccgttaataatgccgtattggaatcaaggcctgtaattaatggcacgagtactagcgcaccaaatgcaacaaaaagcatttgtaggccaacgaaagattgttttaatttgctttgattttccgctagggaaggagggatttggtttgtcatttagtttcaactctctgtttgaattaacttaaaagtgcggtcagtttttcttgtgtttcacgcacggaaaaaagacggcttagaatgccgtcttgtttttggggattattttgtcccaaaaattttatcgcccgcgtcaccaagaccgggaataatgtaaccttgttcatttaaatggctatcaatagaagcgcagtaaagttcaatgtcagggtgtgcagcctcaagagctttaattccttctggtgcagcgactaacactaatactttgatatgtttacaaccttttgcttttaaaagatcaagggtggcaatcatagaaccgccagttgcaagcatcggatcgaccacaattgaaagtcgctcttctaaatcgctagctaatttttggaagtaaggaactggttcaagggtttcttcattacggtagatccccactacactgatgcgtgcgcttggtacgtgttcaagtacaccatccatcattcctaaacctgcacgtaaaattggtacaaccgttacttttttacctttaattcgatcgatttctactggcccattccaaccgttgatcgttactttttcagtttctaaatcagaggttgcttcataggttaataggctaccgatttctgttgcaagttcacggaatttttttgtatcaatctcagcttcacgcatcacacctagtttgtgttttacaagtggatgttttacttcaaccagtttcatttttactctccttttggctcttaaaaaacaaattgacaaattctagattaaaaaaatacaaaatggtagaggtttataaaaatattctgacttgaaacgggagttttcaatacaatattgtctttaaactggtcgaatactctctacatctaattttgcatcaaactcattaagtagaatttgtaatttactatctttttgcaactcattttgagctttttcccgcaatgcttgataaatattgcggcgatattcaattggcgtcgtgacattgctatcatcaagattaattgttaatcgaatatctttaccttgtaatttgcttaatgcttcagctaaattttttatacttctgtcttggcgtaaatgggatttttctgaatgtagtccaagattgatttcatcatcggttttgctttgtaagaaacaatttaatgctaattctttgctaaatcctgttaagccagaacgctcaactatatctgcccactcatcttgttgttgagtttgggtaatgatttttaaacgtaattcaggcgtaatatcttttaaaatcgcctgttttatatcagaaggacaaacgcctgtatcggctttagcaagttctggattgctccattcccaacgataggtgtcagcactcaagatttcttgctcatcttgagcaatttctacattattatcacttgaattttcttctgtgctatttttttgtggagcctgtgcggcatttgatggtaatgttggcttttctatgtgcttgggcttcggctcagtcatttctcgcacgggaagtgcggtcatttttttatgagatttttcttcgtctagttcttggatgtgatgtaaggtttcacttactacagctaatgattcagctttgtgttcttgacgttcttggttttccagttgtgttaaatgttcaagcgcatctaaagccgaaaggcttgccaaatttggaatgctcgttttatttagttttacttgagaataagcagatttgatactttgcgacagtactggcacatcgacataattacccgtattttcaaccgcacttggcgttgatggcggtggagtaatagtggtgttagcctttggtactgccgtaaggaactttgggtggaatgccaatgccctcaataatgtcatctctgcaccaatacgacgatttggtgcatttgataaatcttttctaccagaaacaatgacttgataaaaaaactgaacattttctggagagatatgtttggctaaaaatgaaaaatgttcattgttatctgaagatttttgtggaagaagttgcataagcgcaatttgatgtaatttttctgcacattcgccaagtaatttatcccaatcgcctgccgcatctgcaactctttgcagtgttcgcattaagagttcgccattgccttgatgtaaggcgtataaaatatcaacagaatagttatcatcaagcaaccctagcatattgcttacaacattatttgtaacttgtcggtcgcccattgcaatggcttgatccgttaaacttaagctatcacgaatacttccttgtgccgcttttgcaagtttaactaatgcgggatcttcaaaaggaatattttcttgcgtcaaaatatgggcaagatgctgggagatttgggtttcatctaatgctttaagatgaaattgtaaacagcgagaaagaatagttacaggtagtttttgtggatctgttgttgcgagtaaaaattttacatattcgggcggttcttctaaagttttgagcaacgcattaaatgaatggcgagatagcatatgaacttcatcgattaagtaaaccttaaatctgcccacaactggtttatattgcacgttatccaataattcacgcgtgtcttcaacttttgtgcgagacgccgcatcaatttcaattaaatcaatgaaattgccttgctcaatggctttacaattttcacattcgccacaaggtgttgccgttacgccgtgaacacaatttaatccttttgcgaataatctagcaatagaggtttttcctacaccacgcgtgcctgaaaagaggtaagcgtgatgtagtcgattatcttttaatccatttgctaatgccgtgataatatgttcttgcccaacgacatcagcaaatgtttttggtcgccactttctggctaagacttgatagctcatcgaatccttaattaatgaccttcaaaattgacgagtgtatagcaatcaacgcccaaattatttaagcgtttttcgccacctaattcaggtaaattaatcacaaatgcagcgtgttttaccgctccacctaaacgttgcactaattttactgtcgcttcaacggtgccaccagttgctaataaatcatcaataattaaaacattgtcaccttctgaaattgcatcaacgtgcatttccaaagtatcttgaccatattctaattgataagattgcgaaatagtttcacgtggtaattttttaggtttacgtactaattcgaaaggtaaacctagtgctaaggcaacgggggcaccaaaaataaaaccacgagattcagttccaagcactttggtaattcctttatcgcgatattgttccacaataagatctattgttgctttaaaagctgctggaacttctaaaagggtcgtaatgtcgcgaaagataatgccttcttttggataattaggaattgatttgatagaagatttgattaaatcaagttgtgtagtcataaataatgctcaaaagtgcggtaaaaaaagaaacgtttttagattggcattctatcataaaaaaatagaaagagaggaaaataaaaatccccaattggggatttttatttaggctggaatttttaatccaagccgaattaaaaattcttcaataagaattattttttcttcgcttttgcatttggcaggtcagtaattgagccttcaaatacttccgcagctaagccaacagactcgtgtaaagttgggtgagcgtggatagttaatgcgatatcttctgcatcacaacccatttcaattgcaagaccgatttcgcctaataattccccgccattagaacctacgattgcaccgcccagtacacgatgtgtatctttatcaaagattaacttcgtcataccttctgaacattcagatgcaatcgcgcggcctgatgcagcccaagggaatttagccacttcgtagtttaagccttcttgtttacattctttctcagttttacctacccacgccacttctggttcggtataagcgattgatggaattactttaggatcgaagtagtgtttttgtcccgcaatgacttctgcggcaacgtgaccttcgttaacacctttatgtgctaacattggctgacctacaatatccccaattgcgtagatatgtggcacgttggtacgcatttgtttatcaacgtgaataaaaccacgatcatccacttcaacacctgctttacctgcatcaatcaatttaccatttggcacacgaccgatagcgacaagtactgcatcataacgtttggtgtcattacaggctttgccttccattgaaacgtagataccatcatcttttgcttcaactgcagtcactttggtttcaagcattaacttgaattttttctcaacttgtttagtgtaaataccaacaacatctttatctgctgcgggaatcacttggtcgaacatttcaacaacttcaacttcagaacctaaagcattgtatacagtccccatttctaaaccgatgataccaccgcccataataagtagttttttcggtacttcttttaatttgagcgcatctgttgaatcccaaatacgaggatcttcgtgtgggataaagggtaattgaactggacgagaacctgccgcaataatggcattgtcgaatttaacagtcgttgggtttccatcgcgatcacgcgcaactaatgtgtgagaatcggtaaaagtcgctaaaccttcaacaacagtcactttacgtgcttttgccattcccgctaaaccgccagttaatttagcaacaacagcttctttacctgcacgtacttcatctagctcaatgcgtggttcactaaaataaataccatttttattagcgtgctttgcttcttcaattacttttgcaacgtgtaataacgctttagatggaatacaacctacgtttaaacacaccccacctaaggttgaataacgctcaacaataacagtttctaatcctaaatccgcacaacggaatgcagctgaataacctgcaggacctgcaccaagtacaacgacttgggttttaatttctttactcatttttacctcgtaaaaacgttcaaaatattgaccgcacttttacggtctttataggatgggtttctgcccaccaaagatttcattaatcggtgggcataaagcccacctacagattacattactaagcgacgtaaatctgctaaaaccgagccaagatagctaatgaaacgagcaccatctgcaccatcaatgacacggtggtcgaatgataatgacattggaagaattaagcgtggcgcaaattctttaccattccatactggttccatcgatgatttagacacaccaaggatggcaacttctggtgcgtttacgattggcgcaaagtgcgttgtaccaataccaccaagacttgaaatagtaaaacagccaccttgcatatctgatgcagtcaatttgccttcacgggcttttttcgatacttccattaattcacgtgaaagttcgataatgcctttcttgttcacatttttgaatacaggcactactaagccattcggcgtatctactgcgacaccgatgttaatatattttttcaggattaagcgttgagcatcttcggtaattgagctgttgaaacgtggatacgcttctaatgcttttgccaccgctttcataatgaacacaactggcgtgatttttacaccaagtttttgtttttctgctaacgcattttgttctttacggaatgcttctaaatccgtgatatctgctttatcgaagtgagtaacgtgtggaattattacccagttacgatgtaagttagcacctgaaattttgttgatacgacttaattcaacttcttcaatttcgccaaatttactgaaatcaacttttggccatggcaataagcctaatccagcaccatttgctacaccattgccagtagcttgtgctgttgcaccgctttcataagctttaactgcggtcttcacataagcttcaatatcttctttaacgatacgacctttacgaccagtaccttttactttatctagatttacaccaaattcacgagctaaacgacgaataactggtgttgcgtgtgcatatcctgtacttgcttctacttgttcttggcttaatccagatacgttgttatttgattgagctgcttgtgcagtagtatcaggagctgctgcctgtggtgcttgtgcagtagtagcaggagctgctgcctgtggtgctgatgttgaagctgaagctgattctgctggagctgcacctagtacttcaaaacgcataattaatgaaccagttgaaactttatcgcctgatttcactaaaatttcttttaccacaccgccgaatggtgcaggaacttccattgaggctttatcgccttcaacggtaattaaagattgttctgcagtgattgtatcgccaactgcaaccataatttcggttacattgacttcatcaccaccaatatctggcacatttacttctacaatagctgaagccgttggtgcggtagcaaccactggtgcagtaggcgcatcagctactggagcagtaggctcatcagctgctggagcagcacctgccgcttctaatacaagcattggagtaccagttgaaactttatcgcccactttgactaaaatttcttttacaacacccgcttctggtgcaggcacttccattgaagctttatcgccttcaacgttaatgatagattgatcaacagaaatggtatcgcctacgtttaccatcacttctgttacggtaacttcatcactaccaatatcaggaatttgaatttgttttgacattttttgttccttttaaagtgcggtcataaaacacaatgttttttgaccgcagttttcatcaattacgcataaagcggattgatacgatctacattcaaaccgaatttcgcaatcgcatctgcaaccacttggttagatactgtaccttctttcgctaattgagaaagtgcagcaaccacaacataacgtgcatcaacttcgaagtgttcacgtaagtttgcacggctatctgaacgaccgaaaccgtctgtacctaatacatgatagtgcttacttggtacaaatgcacggatttgatcagcataacctttcacatagtcagttgaagcaacggttggtaaatcagctaatacttgagcaacgtatggtacgcgttgtgtctctgttgggtgtaataagttccaacgtgctgcatcatgaccttcgcgtgctaattcattgaatgaaggcgcagaaaatacatctgaagtcacaccgtagtcatttgcaagaatttgtgccgcttcacgaacgtgacgcataatcgcaccagaacctaataactgaacgtgacctttgccttttttaccttccactgtttcaaatttatataaacctttacggataccttcttccgcaccagcaggcattgcaggttgatccatcacttcatttaatgtagtcatataatagaatacatcttcttgtctttcgccgtacatacggttgataccgtcttgcataattacagcaacttcaaaagcgaatgatggatcgtaagtgatacagttaggaatgatacccgcttgaatatggctgtggccatcttcgtgttgtaaaccttcgccatttaaggttgtacgaccagaagtaccccctaccataaagccacgagctaattggtcgcctgcagcccacatcatatcgcccacacgttggaaaccaaacattgagtaatagatgaagaatggaatcatcggttggttattgacagagtacgagttcgctgctgctaaccaagatgcggttgcacctaattcattgataccttcttgtagtacttgaccatcttttgcttcacgatagtaagccactaaatcacggtctgaaggaacatagttttgaccatgtgggttataaataccaacttgacggaataaaccttccataccgaaagtacgcgcttcatccgcaatcattggaacgatagttttaccgatgtttttatcttttaataagatgtttaatgcacgagtaaacgccatagtggttgaaataccacgaggttgttcttctaataatgctttaaactcttctaatgcaggaactttatattcaacatcaaatttagtacgacgagcaggaacataaccgtttaatgctttacggtgaccatgtaagtattcatactcaggtgtgccttcagcaaatttaatgtattctaatttttctacttgttcatcggttaatggtaattcaaagaagtcacggaaacctttaaggctttcgtaagacatttttttagattggtgagcggtatttttactttccgcttcaggaattttataacctttaacttgatgcgctaaaatcacaactggtttcgttgcattttgtgcttttgcataggctgcatataatttttcgctatcgtgtgcaccacggcgtaatgcccagatttcatcatcggtcatatcagcaactaatgcagcagtttctggataacgaccgaagaagtgttcacgaatatatgcaccatctttagatttaaaggttaaatagtctccatcaaccacttccatcattaactgagttaatttacctgaagtatctttcgcgaataatttatcccaatcgctgccccataaaactttaatcacttcccagccagcaccagtaaatagtccttctaactcttgaacgattttaccattaccattcacagggccatctaaacgttgtaagttacagctgatagtgaagattaagttatctaacttctcacgagccgcaaaagttaatgcacctttagactcaatttcatccatctcgccatcgcctaagaacgcataaactttttgatctttagtatcttttaaaccacggttatcgagatattttaagaaacgcgcttggtagatggcattcacagggcctaaacccatagaaaccgtagagaattgccaaaattcaggcattaatttagggtgcggatatgaagataaaccatcagtaaaggcttcttgacggaagttatccatttgttcttcagttaaacgaccttctaagaaagcacgcgcatacataccaggagctgcatggccttggaagaaaattaaatcgccgccatttttctctgttgcagctttaaaaaagtggttgtagcaaacttcatacattgttgctgcagattggaaagtggaaatatgcccacctaaatcaagatctttcttctgactgcgtaaaaccatcgcgatcgcattccaacgtactgctgaacgaatacgacgttcgatggcgtgatcacctggataagcaggttgctcagccacaggaatagtattcacgtaatcagtggtaactcctgttggcaatgaaacaccacttgtacgtgcttgaccaataacttgctcaacaatatattgagcacgctcaacgccctcttcacgaattaatgaatctaatgattgcaaccaatcttgtgtttcgattggatcaacgtcattttttaaaatctcagacataggttttccttaatctgttttgagtgaatattagtttagacaaggctaaacacgaatacggcaatatttgcttttcacaaacatttaacaaatcttgtaaattttagaagattttttgagataaagatagtgaattttcatcaaatcatcatatcaaatcagctttgccataaataattatttgaaagtgcggtaatttttttgtgtttttttgttcgctaaaataaccagtaaaatattgcattccatcgggctttgttttaaagttttttcagatttttttcaaaaaggactcagcaatgcagacaacaactcgaaccctcactcaacacaaacgtattgcacttgtggctcacgatagttgtaaaaaaaatttactgaattggacgcaaaaacacaaagaggcacttaagcctcatatactttatgcaacaggtacaacagggcatattttagaacgagaaacaggtttaagcattcaatctttattaagtggcccaatgggcggcgatcaacaacttggtggattaatcgcagaaaagaaaatcgacatgatgatcttcttttgggatccaatgaatgctgcaccacatgatcctgatgtgaaagcccttatgcgtattgcaacagtgtggaatatccctgttgcgattaatcaaagctctgcagattttcttttaacttcagttttatttgaacaagatgtggaaattgacgtaccagattatgaggggtatttaaaagagcggttagcttaaactgcaacgaaaatttaccgcactttatagttgtagagtgggctttagcccaccaattaaccataaaaaatgaataaaaatggtgggctgaagcccaccctatgatactgaaaaacgcgaacaaaatttatcgccctgttttagttatctcccaaatccccccattacaagtataaagagtatcactttcaactgttcttctgggattggcttgccgtttagtttcaagtcgttattttctagagcaagcgttaatgttacggttttgtccgtgtttacgataatgtcattcacttcaccttcggtaactaattcattcaatcggtgaacgaaatcttgcttttggttttctggtacaaatttagataacaatgaaattgcggtttctttgttcacatcaaaattgatcgaaaaatctttgaattgtttgtataagccactgcgcattaaatcaaatttaggatttggcactaaagcaatatttatatccaatgctactttgcctttttcatcagaaatagaaagaggggtaaatttaatttgaggttgattattcgcaatgatcatgcctgcttgttgtaatttttgcaccaatgttttagataaaggcatatctgagtcggctttgcctattgcaactaaaatatttaaaagttcttgtaatgcgttgccatcaatatggttgaattctacattgttggtcactttacctaagttgttaccgttaatatgtaattcatccagatttgttttattgatgatatttaccgtatcaccctcaacttgtgtagttaaatttgcttggctgtttttctgaataagagagaatttttcgccactctctgcagattcggtattttgctcaaaatagcctattttactattgatattcccactataaataaatggccattttgtgctttgcaacgagccttgtacgacaagatcttttattttaattgatgaagcggttgaaactgcatgattaggggcatttgaattaaatgtatcgacagatagcacatagttatttggtgtattttggtttaaatcaatatttaatacgacatttgaccaatcaaaatctgtcttagattgttcattgtgatattgccccgatgcaagttttaattccgcattaccgcttaatgaataattcattgcgaaattcagttgtaacggtttctctgattctgtgatatcaaagaatgcctgagttgttgcattttttcctaacaatgtttggcttgaaaaaatggctggaacgaaattcagttttgccacacgatcaagcggcaaaggcccgtgataaagtgttgatgataaaggaataatgatcgtttcatttgccttgtgaatttctatttgatcttgaatgtgagaggcaaataatcctctttcaaattttatatttttataaaaaattttactttcttctaatgcctcaattttggtaaatagttgatttaactgttttagttgatataaatattcttcttcagcttttttccctgtaaaccatgcacttgtgcaccaaacggcagcaagggcaaccactacgcctgcagcaatttttgattttttcatttatttcttttctattttaaagtaaaaattttcgccaaatttatcacaaatccctttttcttgcctgaaaattttgttttccctttgaacttcatcatttgagacttattttgaaaaacaagaacggaaattaccgcactttaagaaataaaaaatttttaaaattttctcttgaaatgcgaaagaatatccacatcttaaaactcgtaataaattaccctgaattttaaaatttttactaggagtacaaaatgggaaaaattattggtattgacttaggtacaacaaactcttgtgtagctgtaatggacggcgataaagtgcgcgttattgaaaatgcagaaggggcacgtactactccgtcaatcattgcatatacagataatgaaatcttagtaggtcagccagcaaaacgtcaagcaatcactaacccaaaaaatacattgtttgcgattaaacgtttaattggtcgtcgttttgaaagtgaagaagttcaacgcgatattaaaattatgcctttcgaaattactcgtgccgacaatggcgatgcgtgggtaaacgtgaaaggcgacaaattagccccaccgcaaatttcagcagaagtgttgaaaaaaatgaaaaaaactgcagaagatttcttgggtgaagcggtaactgaagcagtaattactgtgcctgcatactttaatgatgcacaacgtcaagcaacgattgatgcaggtaaaattgcaggcttagatgtaaaacgtatcattaatgaaccaacagcggctgcgttagcgtttggtttaggttcaagcaaagagaaccaagtgatcgctgtttacgacttaggtggtggtacatttgatatttcaatcatcgaaattgataactttgatggcgaacaaactttcgaagtattggcaaccggtggtaacactcacttaggtggtgaagactttgataaccgtgtaattgattacattattgatgagttcaaaaaagaacaaaacattgatttacgtaatgatgcgatggcattacaacgtgtgaaagaagctgcagagaaagcaaaaattgaactttcatcagctcaatctactgaagtgaaccttccgtacatcactgcagatgcgacaggccctaaacacttagcattaaatatcactcgtgcaaaattagaagcattagtagaagatttagtggcaagctcaattgagtctttgaaagcggtattaaaagatgcagataaaggtgtaagcgaaatccacgatattattcttgtgggtggccaaactcgtatgccacttgtacaacaaaaagttgctgaattctttggtaaagaagcacgtaaagatgtgaaccctgatgaagcggtggcaatcggtgcggcagttcaaggtggtgtattaaaaggtgatgtgaaagatgttcttttattagacgtaactccattatctttaggtatcgaaaccatgggcggtgtgatgaccactttaattgagaaaaataccacgattccaactaaaaaatcgcaagtattctcaacagcagaagataaccaaagtgcggtaactattcacgttcttcaaggcgaacgtaaacgtgcagcagacaataaatctttaggtcaattcaacctagaaggtattaatcctgcaccgcgtggtatgccacaaattgaagtaacatttgatatcgatgcaaacggcgtaatcaacgtatcagcaaaagataaaaatacgggtaaagagcaacaaattcgtattcaagcatcatctggtttatctgatgaagaaattcaacaaatggtgcgtgatgcagaagcaaatgctgatgcagaccgtaaatttgaagaagttgttcaagctcgtaaccaagcagatggtattgctcacgcaacacgtaaacaaattgcagaagctggcgatgcattgagtgtcgcagacaaagagaaaattgaagctgcagtcgctgagcttgaaacagcggcaaaaggcgaagataaagcagaaattgaagcaaaaattgaagcggtaattaaagcctctgaaccattaatgcaagcagtgcaagcaaaagctcaacaagctggtggcgagcaaccacaacaatcatcagcaaaagatgatggcgtggtagatgctgaatttgaagaagtgaaagataataaataattcaccgctcttcttagcataaacaaagggcgtggaaacacgcccttttggtgtatttattttcagcaacaaattacaaaattactatggcaaaaaaagattactacgaagtccttggcctacaaaaaggggcgagtgaggacgacatcaaacgtgcgtataaacgtttagcgtctaaacatcaccccgataaaaaccaaggcagtaaagaagcagaagaaaaattcaaagaaattaatgaagcttatgaagtattaggcgacgatcaaaaacgcgcagcctacgatcaatatggccacgcagcctttgaacaaggtggtggcactggtggcttcggtggcggctttggcggtgctgattttggtgatatgttcggtgatatttttggcgatattttcggtggtggtggacgtggtcgtcagcgcgttgttcgtggcgaagacttacgttatgacttagaaattagcctagaagaagccgtaaaaggtacaaccaaagatattcaaatcaatactcttgcacattgtgatagctgtggtggctctggggctgaaaaaggttctaaagtggaaacttgtccgcattgtcacggttctggtcgaattcgccgtcagcaaggtttcttcgtatctgaaagtatttgtccaacttgtcacggtagcggtaagaaaattgaaaaaccttgtcgcagttgtcatggagaaggacgagttcataagaaagaaaatctttcagtaaaaattcctgcaggcgtagatacgggcaaccagcttcgcttagctggtaaaggtgcagcaggtgaaaatggcgcaccagctggagatttatatgttgtgattcacgtgagagaacataatatttttgaacgtgatggctctaatctttactgtgaagtaccgattagctttgctactgcagcacttggcggtgaaattgaagtgccgactttagatggtcgggtaaaactcaaaattcctgcagaaactcaaacgggaaaattattccgtatgcgaggcaaaggtgttgcttctacacgtagtggttatgcgggtgatttaatttgccgtatcgtggtagaaacgccagttaatttaactagcgaacaaaaagaattacttcacaaacttgaagaaagtttacaaggtaaagatttaagtaaacatgcaccaaaatcttcaggatttttagacggtgtgaaaaaattctttgataacttgggtaaatctgacaaataaagataatgaaaaagtccgcatttcgcggactttttatatgcaaataatctcttctaaaaattaccgcactttaggttttatttgcggacagtatattcgccttcacaaacccatttataactggttaatgcttctaatcccattgggccacgagcatgaagtttttgggtactcacggcaacttctgcgcctaatccaaattgtccgccatcagtaaagcgtgtgcttgcatttacataaacggctgccgcatcaacttgattgataaattgacgggctaggttttgtgaggacgttaaaatactttcagaatgttgtgtaccatattggcgaatatgctcaatagcggcatgaatatcttccacaacaaccacattcaaatccaatgatccccattcttttcgcaattctttttctgtcacttcgcagacattcgcacctgcttgtttcaatatattaagtgcggtggattttgcatgatattttacgtttttagcggaaaggtgagagacgagttttggtaaaaattcttcagcaatagaatgttgaactaacaatgtttccaatgtgttacaggtgcttggacgttgggttttggcgttatcaataacaaaaaccgctttattttgatccgcactttcttcaacgaaagtatggcaaacacccacgccacccacaataactggaatagtcgaatgttgtttacacaattcatgtaaacccgctccaccacgaggaataatcatatccacatagcgatccagttttaataattgcataacgagttcacggtttggatcggtaatggcttgcaccgcaaattttggtaagcctgcttgctctaaagtattttgcacaacttcgattagaattttgttagaaaactgcgtttctttaccgccgcgtaaaatcactgcattaccggttttaaggcaaagacttgccacatcaatggtcacatttgggcgagcttcataaattgtgccaatgacaccgagcggcgtgcgtacgcgttcgattttaagtccgctatccaatgtaccgccgtctatgattttccctacgggatctgcaagtgaaataacatggcgtacatcattagcaatgccttgtaaacgttcttgtgtgagcagtaagcgatcaatgaaggcatccgataatccattttgtttggcaagttcaatatcttttgcgttttcggctaagataagcggtgcttgttgttcgagttgttctgcaataatggataatgcacgatttttttcagcagtggtgagttgagccaagataaatgcagcatctttggcttgtttacccatttgttctaacatagttattccctttattgtatttatttctttttatttggcagcttatcttgttcttccgatgtgagttcttggtaattaaacaccggcaacccccattcgaaatgaatagctaaaaggcgtaaagtaaagctgctaataagtgtgagtaacacggcaagcgtatgttctacttgaagtgtacttaatgcgtaataagtcagcgtggcaaatagcgcaatgctggcatagagttctttttggaatacgagaggaattcgattgcatagcatatcgcgtaaaaccccgccaaaggcacccgtaatacagcctgcaatgcaaacaatggtaaggctatgtcccatatctatcgcaatttgtgcgccaataatggaatacactactaaacccatcgcatcgagcaccaagaaaatagtgcgaaagtagcgcataaaatgattgatgaatggtgcaacatatacggtaattaccgccgcacttgccaccattaaaaaatattctgggtgcttaacccagccgagaggataatgcccaagcagtacatcacgcacagaaccgccaccaatggcagtgacggatgcgataatgatcacgccaaaaatatccattttttcacgacctgccgcaagtgcgcctgtcattccttcagcggtgataccgatgatatataaaatactaagtaacattcatgtacctaagtgcggttaaaattggtttcattttactttaaaatttaatgaatttttagcataatggcacattattttttcagacgtcaaaattatgtcagaacaatcttctaaatatatcgcagcattgcttgcggtattatcgatctcaatggtgcttggcatcgatctatttattttttctttgcaatctgaaaagcaaacaatgcctcatttaggtgtaggcgtgttggttgcacagttaatttctttattggtgttttatcgtggcgaaatttgcccaggacaacgtggtcgtttaatcaaagtgaatatgacttttgctatttattgggcagtgtggttgctgataagcctattacaaaataatcacacgcttactaacgtgatgagcgtatgtggtctttctgtcgtgtattttatttggaaacaacccaaaactgaaaaaattcgtaacagctttttattgatggctgcattaattgcgggtttaggttgcttgagttatttaatgatttttaccgtgcttcctgcgagtgattttgctgaatataacccttttgcaccaattttatctggcgtgattttagcaaatcttgtgcttgttattgcacgaaatcgtttacaaggttttatagcattgttgcccttagccatgattatattgctggccttaaatgctttggcaatgttcttatttttacttttaaatggcatggaaagtgcggttaattctgacagtattttcgcttacatcatttattttgtttgccattttgcgattgcggctattctgattctgcatagtttccaaaagtggacattatctaccaatagtttatttatcctattatttattgctgtttgcttgccgttatggatggtttttgtttaataaagaaaacaatcattgcaccgtggggaatttacccacggcttttaagatttcggctggttagaaagtaatacgccaacacggaaatcacgacacatgcccccatagtaaagagcattggtgcggcagtatccattttcattgacgcgactaaacttcccataattgcacccactgcaaaacgtacgctaccaatcaaagaatttgttgttcccgccatttgaggacatttttctaaagctgatgccattgcatttgatgaaatcactgggtttggaccgacgaaaaaggcgacgccaattgccattggccaaaaaccaagatctaaaagtgcggtcaaaattagccacattccagaaaggaattgaattgcgagggctatccgtaacattgtttctgcacccactttagtaacaaatcggctattcaaaaaggaggcaaagatcatcgtaacgatattcatcataaagaaataaccgaactgatcgacgggaacgccataaatgccgatatagacaattgatcctgccgtcacaaaagcaaacaacccaccaaagctaaaagaggcggcaaacatatagccaagcacttctttttgcttccaaagcagaaggaaattgcgagcgataatatttaagcgcagcggaatgcgattttcttttttatgggtttctggaatgatgaaaaagaccaatgcagcggctaataatcccacaagcgaaataacgtaaaaaatcgcatgccaatggaaaaatttaacgatgtaaccaccaatgattggtgcaactaaaggtgcaagcataaacactaacgtgatggtggacatcactttggatagctgatctttactaaataaatcacgtaataatgcgcctgaaagcacaacaggtgcggcaccaaagaaaccttgcacaaaacgaagtgcggtaaaatttccaactgaatttatttcggtaagtactaaagctgttagtgcgcccacaataacaccgagtaaaatgatcggttttcgtccgaaactatcaccaaaaggcccccaaaaaagctgaccaaacgccatgccataagcaaaagaggtgagcgtgtgttgtacttgttctggacttacgtcgagatcctttgcaatttctaaaaaagacggcaaatacatatccacgccaaagggcggtagcatagagagaataccgagggtaagaataaagatgaaagtcgatttttgttgattcatattattttactaacttttcaatttcactttgagttaatgagcggtattcgccttcttctaaggattcatccaacactacatcaccaattttccagcgatgtaatccaacgactttattcccaagtgcggcaaacatacgttttacttgatgataacgaccttcagaaatggtcagattcacattgtagtcatctaaaatttctaattttgctggtttagttggctctttttctccgcgtaataaaataccttccgaacaagccgctgcataattttcttctacgggatcagctaatgttaccaaataggttttttcacaatgatgctttggggaagtgatgcgatgtgaccattgtccatcatcggtaagcaatacgagacctgtcgtatccacatctaagcgacctgcgctatgtaattttccagctaaagggtaatcaaaaaattgataaatagttggatagtcgccgtcatcattagaacaaacacagccttgtggtttatgcaacataaaatactggccttcttctacccaagttaataattcatcttcaaaataaatttcgtcttcttgtgaaatttgtactgagccacttttgacaatttcaccattaatttttaccgcactttgatggatcgcttttgttgcttgagaacgagttaatcccacattttcagcaataaatttatctaatctcattatgttttctcttgttaaaattcgctaggcattgtacaggtttttgcttttagaacgaaacaaaaaaggctgcaatgcagccttatctattaagcttgattaagccacttcacgtaatcgaattgatcgtaatattttttcccattccagcctgaaaattcaaaaatatcgcccacctgattttgtttctcgaagccttttatataataagccgatttaaaagcagggcagggcttgtgagtaaaaatcactttatttttgaaagggagttgatcaaaaagttgaatgtctttttcggtcacgccgtctcgatctgtcatcataataaaaagattatcgaaattcattcgtgacgtgcgaagttgccatttttcattggcttcttgctcactgtgataatgtataaaatgaatttcaagatcagcaagttttcccactggataacttttttctgtttgtacaaatgtgagaggttgagtacggtagaaatccatattttgtaaataacgcaaaaaatcctgtggcaagagacagagattcacaaaaggggaattaaacggctggtgcaaatcatgtaagataaaagcccccacgcaattggcagaaatgacagtcatgccttgatttgttagtttacgttgcagagtgcgattaatgaaaaatctttggcatttattcaccgcacttttaattttttgaaatggattcattttctcatcctttatgcttttgttgcgaaaatcctaccttttttgctgaaaaatgaaaagtctagctaatgcctcgcatcaaaaaaattttgttataaagttgtgaaaatttgcagttcgtcacaattttttgaataaaaaacagatataatcgacgcaatatttcaatcctgtttcaagaaaatggagcacttattatgaccgaacaattacgtcaagcagccttagatttccacgaatttccaattcctggaaaaatcgaagttaccccaacaaaatcactcgcaacacaacgcgatcttgctttagcttattcaccaggtgtggcagagccttgtttagaaattgaaaaagatcctgccgcctcttacaaatatacagcacgtggcaatttggtggcggtgatttccaatggtacagcggtacttggacttggcaatattggcgcgcttgccggcaaacccgtaatggaagggaagggcgtattgttcaaaaaatttgcgggcatcaacgtatttgatattgaagtgaatgagcatgatcccgataaacttgtggatattattgcctcgttagagccaactttcggtggagtgaacttagaagatattaaagcaccagaatgtttctatatcgaacaaaaattgcgtgagagaatgaacattcctgtattccatgatgaccagcatggtacggcgatcattagcgctgctgcgattatcaattctcttcgtattgtaggtaaaaaaattgaagatgtccgacttgttgcttctggtgcgggtgcagcatctattgcgtgtttgaacttattactttctttaggcatgaaacgtgaaaatatcacagtttgcgactccaaaggcgtggtatataaaggccgtgatgacaaaatggatcaaaccaaaaaagagtatgcaattgaagataatggctggcgtaaacttggtgatgcgatgccaaatgcagatattttcttaggttgttcggcggcaggtgcgcttacacaagatatggttaaaagtatggctgcgcatccaattattcttgctttagctaatccaaatcctgaaattaccccgccagaagcaaaagcagttcgtcctgatgcgattgtatgtacaggccgctctgattatccaaaccaagtaaataacgtgctttgtttcccatttattttccgtggtgcattagatgtgggcgcaaccactattaatgaagaaatgaaacgtgcggcagtttatgccattgctgaccttgcattagaagagcaaaacgaagttgtaacctctgcttacggtggcgaaggggcaacatttggtgcggattatgtgattcctcgtccatttgatcctcgcttgattgtgcgtattgcaccagcggtagcaaaagctgcaatggaatctggtgtggcaactcgtccaattcaaaattgggatgcttatgttgaaaaactcactcagtttgtttacaaaacgagcttgtttatgcgtcctattttcagccaagcaaaatcggcaaaacaacgcattattttagcggaaggggaagaaaataaagcattacatgccacccaagaagtgatttcaatgggcttggcaaatccaattttaattggtcgccgcagtgtgattgaagaaaaaattaaaaaacttggtttacgtttaactgcaggtgtagattttgaaattgtggataacgaagataatcctcgctatgaagaatgttggaaacactattacgaacttactaaacgtaaaggcattacacctgcaatcgcaaaacgtgtcgtgcgttctaacactaccgtattagcttctacattgcttagcttaggttatgcagacgctttagtatgtggtttatttggttcatacggaaaacaccttgcctctattcgagatattattggcttaaaagacggcgtgaaaactgccgctgctttaaatagtcttgtattaccgacgggtaacgtattcttaacagatactcacgtaaacagtaatcctacagcagaagaattagctgaaattaccttaatggcagcagaagaaattcatcgttttggtattgaacctgcagttgcgttgctttcacactctaattttggttcatctgattcattaggcgcaccaaaaatgcgcgaagtattacagatcgtcaaagtgcgcaatccacatttaatgattgatggggaaatgcgtggcgatttagcgatgaatgaagcacacagaaaagaattaatgcctgatagcccattgaaaggaagcgcaaatttattagtgttccctgatttgagtgcatcacgtattagttatagcttattacgcggcaccactacggcaattactgttggcccgatcttaatgggtatgaataaatctgcgcatattcttaatccaggtgcatctgttcgtcgtattatcaatatgattgcctatgcagcagtgaaagcacaacaagagtaattaaaaaagtgcggtaaatttctgtcgtttatttaatgaagcctcgatttttctcgaggctttattttctagtgaatgtgtttacatttgagattaagtaaaactatgcgaaaatttaccgcactttaaggcttttgtcgtgtcgaaaaggaaccgaccgatagacagttgcctatctttctttaatttaatacggcttggatgccgttgtgttagtggtttttacaatgaaaaaagcacattcccctttattccccatcttcacattcgtgttgattaatctcattatcctttccttatcccgtttgggacttgctgtatggcaatcagagcgtgtatccgccgtagatggctggttgcaattatttttgcaaggcgtacgaatggatgttgtggcactttgttatttatttggcgtaccagcattgctcacaacattgttccatagcagtaaagtttgggtaaaaattttacgcctatggctaacctttggtagcgtgttcattatctttatggaaattgccacacctgcctttattgaaacctacgattaccgcccaaatcgtttatttatcgaatacttaatttatccgaaagaagttttttcaatgcttgcggaaggacatttaagtgcggtaatttttagccttgttttcacgattttagctgccgtgatttattggaaaatttctggttgggcagtcaaaaatttacgttcaatgagttggaaacttcgccctgtgattgctttgcttgtgattgtcgtgagcttccttggggcacgttcaagttttcaacaccgtggtataaatcctgctatggtggcattttcttctgatgcgttagtgaattctctggtgcttaattcgggctattccgtcatttatgcggcacagcaatttaaagatgaagaaaaatcttcagaaatgtacggaaaaatggatgcagatgaaatgtttcgtattgttaaagctagccgtggccgtccagagagtgattacatttcagataaatacccaactttaacgaaaaatgtcgcgacttatcagggtaaacctaaaaatatcgtgattttgctacaagaaagtctcggtgctcagtttattggaacactcggtggcaaaccactttctccaaatgtggatcagctcgcaaaagaagggtggttatttgaaaatctttatgcaacaggcacgcgttcagtacgtggtattgaagcaacaaccgcaggttttacgccaacaccagctcgtgcagtggtgaaacttaataatgcccaaagtggtttctttactattgcggatttattacataaacaaggctataacacttcctttatttatggtggcgaaaagcacttcgacaatatggcgagctttttctacggtaatggctttaaagatatttgggatcaacaagactatcagaatccaaaatttactggcacttggggcgtgagtgatgaggatttatttgataaagccaatgaaactttcacgaaattacaaaatgaaggtaaaccgttttttagtttagtatttagctcaagcaatcacgatccatttgaatatccagatggcaagattgagctttatgagcaaccaaaagccactcgtaataacgcagcaaaatatgcggattatgccttaggtcatttctttaaaatggcaaaacagtctaattattggaaagatacgattttcttaattgttgcggatcacgattctcgtgtaggcggagcaagtcttgtgccgattaagcatttccatattccagccttgattcttggtgatggcattacgccacgccgtgatagccgtcttgtgagccaaattgatatgccaactacattgctttctttagcaggcgtaagtggcaattatccaatgattggttttgatttaacgcaagatgtaaacccagatcgtgcttttatgcaatacgatcaaactcaagcaatgatgaaaggcaataatgatgtggtaattcaaatgccaaataaagcagcacaaggttattattatgataaatcaacagaaactttaacgccaaaagaggtgcctgatgcaatgaaaaaagaggcattggctcacgctttattaggtagttatttgtataaaaatcgcttgtattcttcaggtgaaaataaatagacagaacgccagcttaagctggcgtttcttttagttatcaaaaacaaactgttcacgcaattgatgtaattgatcgcgaatagccgcggctttttcaaattccaaatcttgcgcaaatttatacatttgttgttccaattttttgatttgttgttgatattctttggcatttttcggtgcattataaagtgcggttggttctgcagccatttttccacgttgtttattggctttcgctttttggtttgcaccttgcccaatatctaacaattcgccgactttcttatttaatgcttgtggcacaatgccgtgttcttcattgtattttgtttgtttttcacgacgacgattggtttcggtgatggctttttccatggattttgtgatgctatccgcatataaaatcgctttaccatttaagtttcgtgcagcacgaccgatggtttggattaaagaacgttcagaacgtaaaaatccttctttgtcagcatctaaaatcgccacaagagacacttctggaatatctaaaccttcacgcaataagttaattccaaccaatacatcaaattcgcctaaacgcaaatctcggataatttcgacacgttccacggtatcaatatcagaatgtagataacgcacacgaatcccgtgttcatccaaataatctgttaaatcttccgccattttcttggtaagtgttgtcactaaaacgcgctcatttttatccgctctttggcgagcttcggaaagtaaatcatccacttgaattgagactggacgaatttcaatgagcggatcaagtaaaccagtcgggcgaaccacttgatcgatgatttcactacctgatttctctaattcataaggccctggtgttgcggaaacatagatggtttgtggggctaagcgttcaaattcctcaaagcgtaacgggcgattatccaaggcggatggcaaacggaaaccatattcgactaaggtttctttacgtgaacggtcgccacgatacatcccgccaatttgaggcacagttacatgagattcatcaataattaaaatcgcatcagagggcatataatcaaataatgttggtggtggttcgccctcatttcttcccgataaatagcgagagtagttttcaattcccgagcaatagcccaattcattcatcatttcaatatcaaattgggttcgttggctgatacgctgttcttctaaaagtttatgttctttaatgaagtattcacggcgtgataccagttcttttttgatgttttctatagcatctaaaatacgttctcttggcgtcacatagtgagttttannnnncattccattcattaattaattaatgaatgaatgnnnnngaaaagacatggctaatacagctaaaattccccagctataaagatcaagcatataagctaaaaataaaacgaaaatcgcaccgctacrkgggcgcatgccaattgttagaatcacgaggaattgtgattttagattggttgcttgtgcagtttgtgtggggcttggcaaatgttggtgtccacagctacaggtgtttggctgaaaagtgcggttatttttcaccgcacttttttcgtgtagagggaggggattgagggatttaatggctaatttagcttttttacgataggcacgtaaaccttgccaaatccaataacagccgagaaataccaataatagcaaggcagttcgttctaaccaaagctggcttaatttgaaataacgtgatgaaagatttagcactacaacaagcaatgttgttgctgtaatcgcgacaatgccttgcattaaggatgaaagtaagctcaagatagtgctttgttttaattggctttcgtgggtggaaagatagctggcgataataaatttgccgtgtcctggcccgagggcatggagtacgccataaataaagctggcgaaaataagtgtgatgcctgccttgatgctattattttgaatttgatgtaaattttccgaaataagctgattaaactctttttgccatgcagcaatatgtaagaaaaaccaaggggaaaaataggcaagtaaggcgagtgcaatcactaataacacgagcccagttttatattttttcatttctactcacattgaattattattttttgcgcgaacattacgcctaaggaatcatcttcgttcttttgggatttatcaagtgaagatgcgtaggcttggattttttcatccacattaggttcaattaattttccttggcaatttttcgaaagtgcggaaaaatctaccgcactttttgaagcgtaagtcatcgccacataataagtgggatcgtaagtttgtaagctaaatgtgtttttttctaacttttgcggatgggcgagtggcacatcaaaataatattgcagttgtaagccttgaacattaatgccgtaattttttgggcgaggggaatatttgattttattattctgagcatcatatagatagctgaaataatgctcactgacgatatttcccatcacatcatcaagaagtttttgtttttccgatttagttctagcttgtttcatatcataaataactgcagacgaacttggttcatccaacgtccatttcattgaaaaacctgtgagttgattattttctataatgggcgtggtttgtatatcaataaatgcgtgaggatgggctaaaacaccaaaactaacgaataaaccgagtaataatgaatacgttttcacaaaaaatcctattattttgaacgctagaatttgaagttgtttattctacacgcaaaaacgaatttttctgtcaaaaatgttgatgtaaatcaaaaaaactctcaatagcatttcccttgcctttcaatattcagtaacatagctcccgtcaagtgattgcttgatattcataaagttcctaaataaaataatgataaatatagctaaactactttcctgccacccgtttcgggtggttttttttatctaagtcgaaagatgcactcttgcattgtgcatttattcttattatgatcagctcgagtataactaagagaataatagatgtttaatttaaagcgtgagcattttagagatgattatctttataggttttatcaatatggtgatactcatagtaagattccttctaatttgtataaagtattggcaagaaaattagatatgataagtgcctcagaaaatatcaacgatttacgttctccaccagctaaccatttggagttgcttgagccaaaagaaaataaaatttattctattcgagtgaataaacaatatcgtttaatttttaaatatgaaaataacgaagtaaataatttatatttagatccacattcttataatttgtaaggaggataatatgatgacgagaaaacccacctctgttggtgaaattctacaagaagagtttttagaacctttaagtcttaaaattagtgatttagctcaaattttagatgtacatcgtaatacggcaagcaatattgttaataatagttcacgaattacgctagaaatggcagttaaacttgctaaagtatttgatactacgcctgagttttggcttaatctgcaaacacgtattgatttatgggaccttgaacacaataaacgttttcaacaaagtcttgcaaatgttaagcccgctctacatcggcatgatacttctacatttgcaatgtaatttgagccctaaagtgtctatttaatttagggaatacttcactctaaatattgacaagtggttaggtttcgccaaacttttgcaaaatctgtccacttgtttcctatattttcgccctattttccagtagaatagggcgaatttttttgtgaggaattattaatgtcatctcaatttgtgtatacgatgcatcgtgtcggcaaagtagtgccgccgaagcgtcatattttgaaagatatttctttaagctttttccctggtgctaagatcggggttttaggtttaaatggtgcgggtaaatcgactcttttacgcattatggcaggcgtagataaagagtttgaaggggaagctcgtccacaaccgggtattaaaattgggtatcttccgcaagagccaaaactcgagccacaacaaaccgtgcgtgaagcagtggaagaagcggtttctgaagtgaaaaatgcactgactcgtttagatgaagtgtatgcgctttatgcggatcctgatgcagattttgataaattagcggcagaacaagccaatcttgaagctatcattcaagcgcatgatgggcataatttagataaccaattagagcgtgcggcagatgcgttacgtttacctgattgggatgccaaaattgaacatttatctggtggtgagcgtcgccgagtggcactttgccgcttattactcgaaaaaccagatatgttgttgttagatgaaccaactaaccacttagatgcggaatctgtggcgtggttagagcgattcttacacgactacgagggtacagtggtagcaatcactcacgaccgttatttcttagataatgtggctggttggatcttagagcttgaccgtggcgagggcattccttgggaaggcaactattcttcttggttagagcaaaaagagaaacgtttagaacaagaacaagcaactgaaaacgcacgtcaaaaatccattgcgaaagagttagaatgggttcgtcaaaatccaaaaggtcgccaagcgaaaagcaaagcacgtatggctcgttttgatgaattgaactctggcgaatatcaaaaacgaaacgagacgaacgaactctttattccacctggcccacgcttaggcgataaagtgattgaagtgcaaaacttaaccaagtcttatggcgaccgcactttaattgatgatttatcattcagtattccaaaaggggcaattgttgggattatcggagcgaacggtgcaggtaaatcaaccttattccgtatgttgtcaggtcaagaacaaccagattcaggttctgtgacaatgggcgaaaccgttgtgcttgcttcggtagatcagttccgtgactcaatggatgacaagaaaactgtgtgggaagaagtgtctaatggacaagacattcttactatcggcaactttgaaattccaagccgtgcttatgtggggcgtttcaacttcaaaggtgtagatcaacaaaaacgtgtgggggaattatcgggcggtgaacgtggtcgtttacacttagcgaaacttctacaacgtggtggtaacgtgctattactggacgaaccaaccaatgacttagatgttgaaaccttgcgtgccttagaaaatgcgatcttagaattcccaggctgtgcaatggttatttcgcacgaccgttggttcttagaccgtatcgcaacgcatattttagactacggcgatgaaggtaaagtcacgttctatgaaggtaacttctcagactacgaagagtggaaaaagaaaaccttaggcgatgcagccactcagccacatcgtattaaatataaacgtattgcgaagtaatttagattgagaaagtgcggtggattttgaccgcacttttcttacttttttgggagtgattatgttagttgatttacatatttttttcgcctttttaagtttggcattgttagtaattcgtggtgcaatgcagcttaatggtaaaaattggcgttcgataaaattattaaaaattttaccgcacttatcagataccttgctgattgtgtctggcgtcgtcattttatacctctttgcttttggtattgaatggtggttagtggctaaattcgcattactgattttgtatattgtgtttgctgcaaaatttttcagtaaaaaagtttctcaacccaaaagcattttcttttggcttgcttgcgtaagttttattggtgcgatgttaattgcctatttaaaataaaacgatgtcatctcgccagcttcaaattttaatctgcaaaactttgccgcttgtgcctgataacgtattaattatcggcgaaagtggcattgctttttctaaagcaacgaatttgcttggacaagaatttgaacatatcttatttgatgcgcgaaatggcattcatcttgaagcgctggctattgcagctggaacactgaaaatgggcggcacactttgtttagtgttatctgattgggaaaatttatctcagcagcctgatcaagatagtttacgttggaatggaaatcagtcagcaatcgccacgcctaattttattgatcatttcaaacagtgcattgaacgttatcatttccccattttaagagaggaaagtgcggttgaatttcctacggttttttattctaacgaacatcacaaaaatgctacgttagcgcaacaacaaattatcgagactattttacaagccgagcaggatatttattttctaacctccaagcggggaagaggaaaatccgcattattgggtatgcttgctaaccaaattcaagcaccagtttatctcaccgcaccgaataaaagtgcggtgcattccgttattgaattttcagaacgagagatagaatttatcgcgcctgatgaactggctattcggttacaacatgaaccagaattcagtcaatcagcttggttgctggtagatgaagcggcggtaatcccattgccgttattgcaagaatattctcaatattttcaacatattgtcttcagcacaacaattcatagctatgaaggtacggggcgtggtttcgaattaaaatttaaacggaaaattcaccgcacttttcagcattttgagcttaaacagcccctacgttggcaagaaaatgacccgttagaacattttattgatgatcttttgttgctaaatgccgaagatgattttcagcactttgactataacaatattacttataacatagaggaaaacgctaaaaatctttccttcccctgcttgcgggggaaggtgcccgaagggcggaagggggatttagatatagccagcctccctcaagctttggaagctcccctcacaagtaagggtagtaaaggaaaatataatcgtcaatttttatttcgagatttttatggcttaatgacattggcgcattatcgaacatcgccactcgatcttcgccgtttacttgatggagaaaatcaacgtttttattttgccgaatatcaacagaatttgctcggtgcaatttgggcattagaagaaggaaatatggctgatgatgagttgattattcaaattcaacaaggcaaacgccgcccgaaagggaatcttgttccacaggcgttatgtttctatgaaaacttgcctcaagcctgtaaattacgatctttacgtatttctcgtatagcggttcagccaaattggcagcaaaagggcattgggcaaaatttgatgcaagccatggaaaatgccgatgtggattttctttcagtgagttttggctacaccgacgaactggcaaaattttggcaaaagtgcggttttgttttggtgcatttaggcgagcatcaagaagcgagtagtggttgttattcagcgattgcccttaaaggactttccaaagaaggcttggctttagttgatactgcgtacaaacaatttcagcgtaatctccctttatcttttcatccgtttgccataaattttgagcaaaatcagcttgattggcagcttgatgattttgattggatgagcttaaaaaacttcgctaattttcaccgcactttattttcgagcgttcctgcgatgaggcgtttattaaaattagcgggcaaagaaaatttcccattaatttccgcttatttaacaaaaaaacaacttcctattaacaagaaaaaaggcgtagaatgtttgcgtttagaaattaaacaatatttagagcgaggaactttatgacagaacaaaccgcaaaaccaaaaggctggtttaaacgcgcacttgaaaaatatgacaacttcattaaagaatggggtttagatcaaccgaattgtagctgcgtgcctatgtcagcaacagaagatgaaaatggtaatttgaagacaaaagaatcttctttaaagaaataaatattaactgtttttttaaacagtgaacttattgaaagatagagcaaattccagtacactatgcctcaattttacacaagattgacgcattatttatatttatgaaaacggcttttttccaacctgatattccaacccaacccaatgatcacaaaattttaggcaatgtattaccaggcgctgatgcattggcgattagtgaaattgcagagcaaaaccaaaatttaaccgtagtggtgactccagatacacgaagtgcggtgcgtttatcacgtgttttatcggaattaagcagtcaaaatgtatgccttttccctgattgggaaaccttaccttacgatactttttctccccatcaagaaattatttcctctcgtttaagtgcgcttttccatttacaaaatgcgaaaaaaggcattttcttattgccgatttcgacattaatgcaacgcctttgcccgccacaatatttacaacacaatgtgcttctgattaaaaaaggcgatcgtttggtcatcgataaaatgtgcttacaattagaagcagcgggctatcgagctgtggagcaagtattagaacacggcgagtacgcagttcgtggttccttgttggatcttttcccaatgggaagtgcggtgccttttcgccttgatttttttgatgatgaaattgattctattcgcacttttgatgtggatacgcaacgcactcttgatgaaattaactcaattaatcttttgccagctcacgaatttccaacggacgacaaagggattgaatttttccgtgcgcaatttcgtgaaacttttggggagattcgccgagatcccgaacatatttatcagcaaatcagtaaaggtaccttgatttctggcattgaatattggcagccacttttctttgctgaaatggcaactttatttgattatttgccggagcaaacgctgtttgtagatatggaaaataatcaaacgcaaggcgagcgtttttatcaagatgccaaacagcgttatgaacaacgtaaagtggatccgatgcgtccgcttttatcgcctgaaaaattatggcttaatgtagatgaagtcaatcgccgattgaaatcttatccacgtattacatttaaagcggaaaaagtgcggtcatcggtacgccagaaaaatttacctgttgccgctctaccagaagtgactattcaatcccagcaaaaagaaccattgggacaattacgtcaattgattgagcattttaaaggaaatgtactgttttctgtggagacggaaggtcgccgagagactttgcttgatttgctttcaccgttaaaactcaagccaaaacaaattcaatctttagaacagattgaaaatgaaaaatttagcttgttagtcagctctcttgaacaaggttttataattgaacaatcgcttcctgttgcgattattggcgaagctaatttacttggcgagcgcattcaacaacgttctagagacaaacgtaaaacaattaatcctgatacgcttgtacgaaatcttgccgaactgaaaatagggcaaccagttgtgcatcttgatcacggtgtgggacgttatggcggtttggtcaccttagatacaggcggcattaaagccgaatatttgctactaaattatgcaaatgaatcgaaactttatgtgccagtgacttcattacatttgattagccgttatgttggtggctctgatgaaagtgcgccattacataaattagggaacgaggcttgggcgaaatcacgccaaaaagctgcggagaaaattcgtgatgtggcggcagagttattagatgtttacgcacaacgtgaagcgaagaaaggctttgcctttaaatatgatcgtgaagaatttcaacaattttccgcaacctttccttttgaagaaacctacgatcaggaaatggcaattaatgcggtaatttcggatatgtgtcagccaaaagcaatggatcgccttgtttgtggtgatgtgggttttggtaaaactgaagtggcaatgcgcgctgcctttttggctgtgatgaatcataagcaagtagcagtgctagtgccaaccacactgttagcccaacagcattatgagaattttaaagatcgttttgcgaatttgcctgtgaatgtcgaagtgttatcgcgtttcaaaactgcaaaagaacaaaaacaaattctggaaaaccttgcagaaggaaaagtcgatatattaattggtacccataaattaattcaatcagatgtaaaatttaacgatcttggattgttgattattgatgaagaacatcgttttggtgtagggcaaaaagagaaaatcaaacagcttcgtgcgaatatcgatattcttacgctaacggcaacgccaattcctcgaacgcttaatatggcgatgaatggcattcgtgatctttccattatttccacacctcctgctcgccgattaagtattaaaaccttcgtccgtcagaatgacgatcttgttgtacgagaagcgattttgcgtgaaattctccgaggtgggcaggtttattatctccacaatgatgtcgcaagcattgaaaatacagcagaaaaactgaccacgcttgtgccagaggcgcgagtaattgtggggcacggacaaatgagagaacgtgagttagaacgtgtgatgagtgatttttatcatcagcgttataacgtcttagtttgttcaaccattatcgaaacgggtattgatgtaccaacggcaaataccattattattgaacgagcggatcattttggtttggctcagttgcatcaattacgtggacgagtcgggcgttcacatcatcaggcttatgcttatttgcttacgcccccacctaaaatgatgacaaaagatgctgaacgccgtctagatgcgttggaaaatcttgataatcttggggctggttttatcttggcaacccacgatttagagattcgtggtgctggcgaattacttggaaacgaacaaagtggacaaattgaaagcatcggtttttcactttatatggaattattggatgcagcggttaaagcgttaaaagaagggcgtgaaccatcattagaagaattgacgcaacaacaagcggatattgaattgcgtgtgccagctttactgcctgatgattatctaggagacgtgaatatgcgtttatccttttataaacgcattgctgcagcagagagtaaagcagaattagatgaattaaaagttgagttgattgacagatttggattattgcctgatgcaacgaaaaatttattacaaattacagagttgcgtttattggttgagccgttgaacgttgtgcgaattgatgctggaacacaaggcggttttattgagttttcagcaaaagcacaagtgaatccagataaatttattcaattaattcaaaaagaacctattgtgtatcgatttgatggcccattcaaatttaagtttatgaaagatctatccgataacaaagtgcggttagaatttgtggtggatttgttaagaacgattgctgcataaaaagaagcccgatcattgtgatcggacttttttcttaaatatatcaagcagattattgcactaataaatagaaattactgtcacctcgtaaaatattaagtgcaactgctgacggttcagtttcaagcactttatttaattcacgaatgttttcgatcatttgacgattaataccaataataatatcgcccgattttaaaccacgttgtgcagccagcgaattaggttgaatttttgtgatttcaattcctttaacgcctttagcatcgtagtctttcaatgttgcgccatctaatgcaggcaactcagtttttgaggaaagttggctaccatcatccgcttgtaatttcattttaacgtcgtgggatttgccatcacgtaagtaagtcaagctaatctctttgcctgcaccagtggttgcgatttttgcacgaatttcagcgaaacttgagattttttgaccgttcatcgccgtgataatatcgcccgctttaagtcctgctttttcagcagcagatttcggtaaaacttcacttacaaatgcaccttgttgcgcgcttacattaaaggctttggctaaatcagcattgagttcgccccctttaataccaagcaatccgcgacgcacttgaccaaattctaaaatttgttgcactaaattgcttgcttgattacttggaatcgcaaaggcaattcctgcattgccaccgcttggagaaataattgcggtattaattccaataagttcgccatttagattgactaatgcaccacccgaattaccgcggtttactgctgcatcggtttgaatatagttttcataagtgccactgtcagaacctgttgaacgacccaatgcagaaacaatacctgatgtcacagtttgacctaaaccaaatggattaccgattgcaacagtgaaatcgcctacgcgtaatttgtcggaatcagcaaatttgatttctgttaaattacttggtttttcaagctgtactaatgcaatatctgattgttcatctttacccactaattttgctttaaattcacgcccatcttgtaattgcacggtaattttatcagctccatcaataacatgattattggttaaaacatagcctttgcttgcattaataatgacaccagaacctaaaccacggaagttacgctttgactctccacgtccaccaaattgttcggcaaaacgatcgccaaagaagaatttaaattcttcaggaatatcgtctaggaaaggagaacgagaatctactttagcttttccttcaacggaaagagtgacaacggcaggttgtactttttctaacatcggtgcaagactgttttgttccgaaacaaaacttggcaaagtggcttgagcaacaaatgatgtgcttaatacacttaatccaagtgcaatactatttaatacaaaacgtgtttttttcataaatactccaaaataaatttcagataacgtggtctgtaagacaaaaaaataaaaaaaatgttcaataagaggagagcaaattatcttgtttaaaaggaaatcggagcagtacaaaaacggtcttacaagtagcaaattctataaatttatgttctaatacgcgcaattttctagtcaataaaaaggtcaaaaaatgagctggattaaccgaatttttagtaaaagtccttcttcttccactcgaaaagccaatgtgccagaaggcgtatggacaaaatgtactgcttgtgaacaagtactttatagtgaagaactcaaacgtaatctgtatgtttgcccgaaatgtggtcatcatatgcgtattgatgcccgtgagcgtttattaaatttattggacgaagattcaagccaagaaattgcggcagatttagaaccaaaagatattttaaaattcaaagatttaaagaaatataaagatcgtatcaatgcggcacaaaaagaaacgggcgagaaagatgcgctaattactatgacaggtacactttatgatatgccaatcgttgtggctgcatcaaactttgcttttatgggcggttcaatgggttctgtagttggtgcaaaatttgttaaagcggctgaaaaagcaatagaaatgaattgtccatttgtgtgtttctctgcaagtggcggtgctcgtatgcaagaagcattattctctttaatgcaaatggcaaaaactagtgccgtacttgctcaaatgcgtgaaaaaggcgtgccgtttatttcggtattaacggatccaactttaggcggcgtatcagccagttttgcgatgttaggggatttaaatattgccgagccaaaagccttaattggttttgcagggccacgcgttattgaacaaactgtgcgtgaaaaattgccagaaggtttccaacgtagtgagtttctacttgagaaaggggcaattgatatgatcgtgaaacgttcagaaatgcgtcaaactttagcaagtgtactgagtaaattaacgaatcaaccttctccttttatggagcctgaactcatttcagaagatgaataatatgcaacttaaagccacttcgccactcgctgagtggctttcttatttagaaaaaagccattttaaacctattgatctcggtttagatcgtattcaatccgtggcagaaaaattggatttacttcatcccgccccttatgtgataactgtgggggggacgaatggtaaaggcacgacttgtcgcttgttagaaacgattctgcttaatcacggattacgtgtgggcgtgtattcttcgccccatttattgcgttataacgagcgagtacgcattcaaaatcaagatttacccgatgaagcacatactgcctcttttacttttattgatgaaaacaaaacagaatcgctgacttattttgaatttagcaccctttctgccttgcatttatttaagcaagcaaaattagatgtggtgattttagaagtggggttgggcggtcgtttagatgcgaccaatattgtggatagccatcttgctgtgattactagcatcgatattgatcacactgattttcttggggataccagagaggccatcgcttttgaaaaagcaggaattttccgcgaaaattgccctgtcgtgattggtgaacctaatgtgccacaaacaatgttagatcaggccgaaaaattacattgccaagttgctcgtcgtgatgtggattggttatttgagcaaaatgctgaaaattggcaatggcaaaataaaaaagtgcggttagaaaatttgccgttttgtcagattccattggcgaatgccgcaacggctctggctgccgttcaatatttaccttttgatatttcagaacagactttgcgaaaatctttgcaagaggtagaactggttggtcgttttcaagctataaaaacagataaacgtgaaaaattagcggattatcttggcgtaccagttgaaaccttgccaacaattatcgttgatgtagggcataatcctcacgctgcaaaatatttatctgaaaaattgaccgcacttaaacgtagcatcgagggcaaaatgattgccgtgtgtgggatgctcaaagacaaagatgcaaatggggtatttgagcatttaacacctattattgatgaatggcattgtgtaaccttaagcggctatcgcgggcagtcaggcgatgaattagcagagaaattgaaaagtcatttcccaaatattcaagctacatcagataattctgtcatggatggtgtgtgtacagcactcaaaagtgcggtaaaaaatgatgtggttttagtctttggatctttccataccgttgctgaattttgggctgtggtagaataaaatttatcattaaaacaaagggctgatatttaaaatcagcccttattttttggaatattatttccaagaatatttcacacccacggtgccttggtaacctttatgactatttttttctctgttttatcttttacatcaattgtgagttctttttcagcattaaaaataggtgtagatttatttgaatcttttctataaatacgaatccctgttaattgctgacctatttgtgttgatgcaccaggaatgctataaacgcttaaaatagtttttttctgtgttatcaacattaattttgacattatcttttagtgttaaaatagtattatttgtgccagtgccatcatgatcatacccaactgcaataccgtaagcagcgttagaatcgggtgaagtatgggtattattttcactagctaaagtaacagcaatatcgctttttccttgaatttcctcagttcgatcagctcggataacaagcccttttgggtaagtgtgtttttggggatcttttggggttactcgaatctttacatcaccagtaacggtattggtagcttccttaacttcatgaccaatgggggttctccagtaattttttcatcaacattttgataatcagtagcaaaagccgtagtagaaagggcagaagagattagaatactaagaagtttttttacaattttgcttgcttttgggattcttgtttcataatttaacctaacaaagttgtgagttcaacgacaattaaagtaaaccctttagcataaaacagtattttccttatcggttggattttaaccagtttgtgtttatttaacaagtttagattagtgtgattttagaaaaatagaagaaatatgatttaggtcaatatttataatgtggtgctgtttggcaatggctgaggttcccctaaaaaataaggctcaacacctaatatcaagtcaaaaaccgcttttatgcgggcaaaaacttctcttatttgcgtggaaaaatgtaattctggctgttttgccacaaagcaaatggcatcaatattatgtgcttgggcaattaatagcgcgcgttcgcaatgaaatttttggctgacaatcgtaaatgcttgcacttggaaaattttatcggcacgaacaacagaatcaagggtgcgaaaacctgcaaaatcacggaacattaaagtttctggcacgcccattttacgtaaatcgcgaaacattgctcttggttcgttatattgcaaagttcggttgtcgccacttaataaaagataattcactttttgttgttcgattaggtttttagcagcggttaagcgactatcgtaataaacgttcggttttccgctgacggtgtattttgatgtaccaagcacaagggcataaggacgaaaggggagttcatcaatatttgtgaatattttatcgcgaacataaaaacttacgcctcgatccactagcaagcaaagtataatcaatgcaaagattgcgtagagtagtgcgcgaaaaagtgcggtgaattttggagataatttttttactagcatagcggtaaacataatgaaaaatcgaccgcacttcaaggagaatttgatggattttgtgaatcgcattgatgtgcgataatttagccgtttagacggctaaaatttcttgacaagctaatcgacttactgatagtttaaacgccattctgattattacgataggttttcaatgtctgtgcaaaatgtagtgctttttgacacacagcctttaactctgatgcttggcggcaaactttcccatattaatgtcgcgtatcaaacttatggcacactcaatgccgaaaaaaataatgcggtattaatttgccatgctttgactggcgatgctgagccttatttcgatgatggtcgagatggctggtggcagaattttatgggagcaggtttggcattggatacggatcgttatttttttattagctcaaacgtattaggtgggtgtaagggaacaactgggccttcatcaattaatccgcaaacgggtaaaccttatggtagccaatttcctaatattgttgtgcaagatattgttaaagtacaaaaagccttgcttgaacatcttggtattagccatttaaaagcgattattggtggatcttttggcggcatgcaagcgaatcaatgggcgattgattatcctgattttatggataatatcgtgaatctttgctcatccatttattttagtgctgaagccataggctttaaccatgttatgcgtcaagcggtaattaatgatcccaattttaacggcggcgattattatgaggggacaccgccagatcaagggttatctattgcgcgtatgctaggtatgctgacttaccgaaccgatttacaactagcgaaagcctttgggcgtgctacaaaatcagatggcagcttttggggcgattactttcaagtggaatcctatctttcttaccaaggcaaaaaatttttagaacgttttgatgccaatagttatttgcatttgttacgtgcgttggatatgtatgatcccagtttggggtatgacaatgttaaagaagcattgtcacgcattaaagcacgctatacattggtttcagtgacaacggatcaactttttaaacccattgatctttataaaagtaaacagcttttagaacaaagtggagtcgatctacatttttatgaattcccatcagattacggacacgatgcgtttttagtggattatgatcagtttgaaaaacgaattcgagatggtttggcgggtaattaattagtcataaaaaagtgcggtgaaatttcaccgcacttcttctcttataataggttattcttcagaactactttcttccaaagaatcttcttcatccgcatcacaaacacgctctaaacttactacgtgttcatcatctgcggtacgaattaaacggacaccttgcgtgttacgccctacaatgctcacttcgcttacgcgtgtgcgaacaagcgttcctgcatcagtgatcaacataatttggtctgtttcttctacttgagttgcggcaacgactttaccattgcgttcactcactttaatcgaaatcacaccttttgtattacgtgatttagttgggtattcacttaattgtgtgcgttttccgtagccgttttgtgttgcggttaaaattgccccttcaccttttggcacaacgagagaaaccactttatcgatatttaagtctaatgatgcttcagcgttgtcatcagaaatatcttcaatttctaccgcactttcatcgtcagaaatatcgtttgttaaagccagtttgataccgcgaacacctgttgctaaacgccccattgcacgcacggcattttcagcaaaacgcaccacgcgaccttgcgatgagaacaacataatttcgttgctgccattagtaatatccacgccgattaattcatcttcgtcacgtaaattcaatgcgatgataccgtttgaacgtggacggctaaattcggttaaggcgattttcttcacaataccgccagcagttgccatgactacgaatttatcttcttcgtaagcagaaactggcaagattgcagtaatacgttcgttttcttgtaacggaagaatattcacaattggacgcccgcgtgcgccacggctcgcttgcggaagttgatatactttcaaccaatataaacgaccacggctagagaagcagaggatggtatcgtgagtatttgctaccagtaatttttcgatgaaatcttcttctttcatcttcgttgcagatttgcctttaccgccacggcgttgtgcttcatagtcagtcagtggttggtatttcacataaccttcgtgagaaagcgtcacaaccacgtcttcttgtgcgattaaatcttctaaatcaatatcgccagaagcagcggtaatttcagttaaacgatcatcaccaaattgtgcttttacttcttccaattcttcacgaattacttccattaaacgttctgcgctacttaaaatatgaagaagatccgcaattttaactaataattcttcatattcttttataacttcttcaaacgcaatgcccgttaaacggtgtaaacgaagttctagaattgcgtttacttgcgctggcgataagtaatattgttcgccttgaataccaagattttcttctaactcatcaggacgagcagaagcatcaagaagattaataatatcgctatgtaacgtccaagagcgtgaactgattgctgttgccgcttcctcacggtttttagagttacgaatgatcgcaatcatttcatcgatattagaacgagcaaccgctaaaccttccaaaatatgcgtacgttcacgtgctttgcgaagctcaaagatagaacgacgtgtaacgacttcacggcggtgtaaaacaaaggcttcaataatttctttaagattaaataaacgtggctgaccgtgatccaatgccaccatattgataccaaaggtcacttgcatttgagtgagtgagtaaagatggtttaataccacttcccccactgcatcacgtttaatatcaatttcaatacggatcccttctttatttgaaaggtcagtaatattgctgataccttcgatttttttctcgcgaattaattcggcgattttctcgactaattttgctttatttacttggtatggcaattcagacacgataatttgctcgcgtcctttttcgttggtttctacggttgcacgagcacgaacatacactttaccacgaccagtgcgataggcttcttcaatccctttacgaccattaattaatgcagcggttggaaagtctgggcccggaatatgttgcattaattcatcaatggtaatttcattgttgtcaatataagccaaacaaccatttaatacttcgtttaagttgtgagggggaatgttagttgccatccccaccgcaataccagaagaaccatttgctaaaagtgctggaatacgagtcggcaatacatctggaatcattaattcgccatcatagtttggcgagaaattgacggtttctttatccaaatccgtgagcaatgcttgcgtaattttttgcatacgcacttcggtataacgcattgcagcaggtgcatcgccgtcaattgaaccaaagttaccttgcccatcaaccaacatatagcgaagtgagaagggttgtgccatacgaacgattgtatcgtacacggctgagtcaccatgcgggtgatatttaccgattacatcacccacaacacgcgctgattttacgtattttttattggcggtattgccttcgcgatccattgagaatagtacgcggcggtgaacaggttttaaaccatctcgaacgtcaggtaatgcacgcccaacgataaccgacatcgcgtagtcaaggtaggaagatttaagttcttcttcgatattgacaggggtgatagatgattggattgaatccgtcattggtattccttttttgatcaaaaattgtggcggattatagcataaaggtatgttttttacattaggatttcgcctgatggcgacttactttcttttgcttgtacaaaagaaagtaagcaaaaagaaaggcgaccctacttttccttgtttcctttgttccattgaatttgcttaacggaaatttgctgaactcgctacgctcaaacagacgcaaatttcctacaaattcaattccacaaaggtggaaaagaagggaacccaatttgttctttatccgatttaaagtgcggtcaaaactcaaaatattttttgttcttaaaatgaatttaaaattaaccgcactttttaaataatgctctgataaattcggggccccatataaatcgcctttgcgactttcaatttttaggcaatttgcgtctgtttgagcgtagcgagctcagcaaattgccgttaagaaaattgaaacaaagcaaagaacagcgatttaactggggcgtgttttctttgtctactttcttttacacgagtaaaagaaagtaggtcgccgtcaggcgaaatcctgacctaattatttccaattttcttttttggctttctgcaacttcccataagcccccaacagcgcctgatgttcattaaagttttccaaattttcatcacttgcaggaagattgtagaacggattgccaccttcagagacagctgcccaagcttgtttaactgcatctttaccatacattttctcaaacactgaacgatattgcgctggttcgcgattttgatctaaatgtaattcaatgatggaaattaatgtgcggtaataattcacaggttctgtggtgaatacggagctgttcatattcagcgtccaatttgcccaatctaatgcttgttctaattcgcctaatgcaaggtggagcatagattttaattcacccacgcgtaaggttgtccagctgctatttttaggtgcaacgatgccgataaattcacgcacgcgagttgcatcgtcaatatcttgaccatctaattcttctaataatttttgataggtttctgcatcgtgatgccagtttggtaaatccagtaaaattttgcgccaatccattcccatattattattggcataaattaaatcgtctgcaggataaatatcagacatacctggcacaataatacggcacgcatagacatccaaatggttgtaatccattacgtaaacttctttttcatcggcacggaaaatcgccattaaattattgtattcttcttgcgtggtaccactgaaatcccaatcagcaaattcataatcaggcgtttttttgagtaaatcccaagaaattaaaccgcttgagtcaataaagtgggtttctaaattagcgtgttcagccacatcatcgttattgaaagagggcggtgagaaaacatccaaatctttcaagctacgaccctgtaaaagctccgtcacagtacgttctaatgccacttggaaatttggatgtgcaccgaaagaggcaaagcatgtgccgttattcggattgagtagcaccacgcaaataacagggtattttccgccaagtgaagcatcaaatgcataaattgggaaaccttcttcctctaattttgcaatggaagcctgaatagatggatagcgatccatcacagattttggaatttctggcagactaattgcttcagcgataattttgtttttcacataacgctcaaaaacttctgacaagccttgcacgcgtgcttcaaattttgtattgcctgcagacatgccatttgaaacataaaggttggcaataatactttgtggaatgtaaacggtttgttcgtccgactgacgaacataaggcatcgccacaatcccacgatcataattgccagactgtaaatctaccaataattcaggcgtaagctcggcattaggatcaaaataatccaataaataatcatctaaaatgccattaggcagtaaagcatcatcttcaatcgggaaccatttttcattgggataatgcacaaaatcgccgtttgcaatttcttgccctaaatagaaatcagcaaaaaaatagttggtggaaagacgctcaaagtattcgccaagggcagaggctaacgccgcttttttacttgcccctttaccattagaaaaacattgcgggcagtctttatcgcgaatatgcacagaccacacatttggcacaggattcaaccaagatgcctcttcaatattaaaaccaagtgcggtcaatttttgctgaaattttgcaatactatcttctaatgcggcatctttgccgagaataaaggtttgttctgtcatttttgttcctaaatgagaaaaaagtgcggtgaataataggggagttttaatagcggagcaagattttttcggcaaaaataaaccccgaaaaacttcggggttttctaccgcacttttaacgtatatttgattggcgttaaagtaaagttggattgaaccgcacttttaaggcaattgtaattgcggcgaaaattttttcatcgttgagaggaaagttttcgcgtaaagtgcggtggggatcagttatgtttatttgagcttgcgataattcatttaataaaatcgggagagaaagattaagttgctcggcgatttgttgaatagaaaaatgctcgaaagtcatcatcaagcgatctaaattgcagtaagaaggcatgcgattatgtgtgatgagatcggcaaattgagtgttgatttttacccatttcttcttacggctataaaaatgcagtaacaaaccaaatacggtaaatccagcaaagaaaagatgaatgtctaaggcttgagcaaaaggaaatcctagccacattgaaatgccacttgcaacaacgaaaagcaaacttaaggctaatccccacactaagaaaaatttataaattacttcaaatttcattgaattatcctttatctacgaaataaatctgtataaggaaatatataacgttaaatattatagaagcattttgcctatttttactgcgttatatttaaataaatatagcgatattgtaaaattcgccattatttctcatttttaaggagctaaaatgaaaaaaatgttcacgattttcaccgcactttttgctttgcaagtgagtgctcaagatttaacttaccaagcaggcagcttgcctgaaccagccaaaattgaaaaagtattaagcgcaggtaatccgagtgatgtgttgttacttgctgttgcaccagagaaattggcaggttttgctggctttaaaatggaatcaaaagcaggtgcgttgtttgaaggtgagattaaaaaattacccacactcggtaaaattgcgggaaaaggcagtacgctttctgcagaaaaaatcgttgcgttaaaacctgacttgattattgatgtgggtaatgttgcgccgaattataaagatcaagctgaccgcacttttgctcaaactcaagtgccttatttgttgttagatggcagattaagtgaaacgcctgctttgttacgtaaattaggtaaattgcttggtaacgaaaaacaagctgaagaacaagctaaatatgcggaagacacgctgaaacaagctcgcgattttgctaaacaacatcataaaacagcctatttagcgcgtaatgcggatggcttgcaaactggtcaaaaaggttcgattcatacggaagcaatggaattggttggcttggaaaacgtcgcagagggagatcaaaaaggcttaactcaagtttcaatggaacagcttttattgtggaatcctcaaatgatttttacccaatatgatgagttttataaagcgcttgaaaacaatccgcagtggaaagaattaagtgcggtgaaaaatcagcaagttttctttgtgccgcatacaccatttggttggattgattcaccaccgagtttaaaccgtttattaggcgtgcgttggttacaacatatgttgaatggtaaggcgaatgctgactttgtgcctgaaattcaacgtttctataaattattttatcacattgatttaaccaatgaacaagtgcttaagttgtttcaagtaaaatgatgagatcgacttttcttttacgttcgcctcgtttgttttttgtcttgttagttggaatattgcttggcagtattttgcttgctttgaatgtggggaaatacccgctttcgcctagccaactttgggagacaataagctgttcgtttagcgggcaatgtgaaggaaatacggaacaaacagtactgtggcaaattcgtttgccacgtatttttgccgcttgttttgtcggggctgcgcttgcttgtgcgggcgcaacttatcaaggtatgtttaaaaatccgcttgtttcgccagatattttgggcgtttcagcgggcgcaggttttggggcaagtttggcaattttttataatttgccaatgatttatatccaattttttgcttttagcggtggcattttagctgtgttatgtgtatcgctcattgcctcgcgtagtcgtacacaagatcctattttagtgctggtgctttctgggattgcaattggttctttacttggtgcaggcatttctttgttaaaaattcttgcggatcctttcactcaattaccttcaatcactttttggctacttggtagcctgacggctattaatcaacaagatttaattcaattgatcccgatattgttgctagggattgttcccatttttttattgcgttggcggttaaatttactgtctcttgatgaagatgaagcacaaacgctaggtgtaccgattaaacgtactcgctggattttaattgtgttcaccacactttgtacggcaagtgcggtggcaatgacaggaattatcggctgggttggtttgttggtgccacacatcgcacgcttgttagtgggagcaaattttattcgtttattgccgacatccttattgcttggtgcgtcttttttattacttactgatacgctggctcgcacgattgcgcctattgaactgccactcggtattctgacttctgcttgtggtgcaccatttttcctttatttattagtgcaagggcaaaaataatgttactcgaaacccaaaatcttgccattggctatgaaggaaaaacactggttcaacatatccgatttaccctagaggaaaatcaaatttgttgtttgcttggtgcaaatggtgcaggcaaaagtacgtttttgaaaactttacttggtttacaaccgcctattggtggtgatattgtttggcaaggaaaatcactttctgattattcaccaacagaatttgctcggcatattgcttatgtgccacaagcgcattctcattcatttccttttttagtgcaggatatggtgatgatggggcgatctgcttttttaaagtggtatcaaactccgaaaaaatctgatttggatttagcattaatggcgttgcaagagttagaaattgctcatcttgcgcaacgttattatcatcaattaagtggcggcgaaaaacagcttgtgttgattgctcgtgcgattgctcaacaagccaaacttttaattatggacgaaccgacttctagccttgattttggtaatcaaattcgagtgttagaaaaaataaaacaactgcaaaagcaaaatattgcgcttattattagtacgcataatccacaacaagcggcatttttaggagataatattgttttgcttgatcaacaatttggctttcaacaaggcgataaaaaacatttattaaccttagaaaacttggcgaaaatttaccgcacttcgtccgaacttttacatcaacatttgaataattacattgaaaaatcactatgactatttacgacatcaattttgctgaactttatcaacagcacttaatcgcttgtaatcattacaacttacctccgataaaatgggataaaaaagccgtgaaaatggcagaaaatttggtcggcaaaccttcagcatataatcagcaattattgcaagctatgaatgtgcaagccgatgaaaccgtgttggatattggctgtgggcctggtacttttgctgtgccactcgcacaacaaggttcaacggtatatgccttggattatagcaatggaatgttagactgtttggcacaattcaaacagaaattggggttgcatcatctcacgacatttcataaatcttgggcggataattgggatgatgtgccacaagctgatgtagtgttggcatctcgttcaacgttggtggacgatttggacgatatgattgaaaaactctgtgccaaagcgaaaaaacgtgtgtttttgacttctgtcacacaacgccatttcttagatgagggcgtatttgaggcaattggccgtgaagatattggtttccccacttatatttatttactcaatcggttgtatcaaaaaggcattcaggcaaatttgaattttattgaaacggaatcgggttgttttcaaggtgaaagctacgaggatttgttagcctcggtggaattttctttaggcgagctgtccgaaaaagaaaaacaaggtttaaaagccttttacgatcgtaaacaaaccaataacgaacccatttctcacggacagaaaaaatgggcgttaatttggtggaatgtggatcgcatctaatgtttcaagtggaatcaatttatttttctatcactaattaaaaggacgattatgttatttgctttacctgcgctgaatgataactacatttggctttatcaacgagaaaatctgccgcttattattgtcgatttgcctgaaacggacaagctgtttgcatggctagagaagcaaaacgcaacgattgaagcggtgttgcttactcacgaacatgatgatcatacacaaggtgtgtcggcatttaaaaaacgttatccaacagtgccgatttatgggccgcaagaatgtgagaaaaaaggtgcgactcaaattgtgaacgaagggaagatccttaccgcaaattatcaaattgatgtcattccgacggggggacacactaaacagcacgttagttttttagtagataatcatttattttgtggcgatgcgttattttctgcaggttgcggacgtgtttttacaggcaattatgcgcagatgtttgaaggtttgcagcgtttgaatacattgcctgacgagacgattgtttgtcctgctcacgagtatactttggggaatttagcgtttgcggaaactgtgttggtagaaaaaagtgcggtagaaaaacaacgtatttttgttgaaacacaacgggctgaaaataaaccgagtttgccaacaaccttaaaactagagcgagaaattaatccgtttttacaagcaaaaacacttgaagaatttaccgcacttcgtaaagccaaagatattttctaatattgggtgatgacaaagtgcggtgattttttaaattagcagattatttctttctcgctaacatggtggcaaatttcattttaatgcgattgccgttttcatcggttttgtgtaattcgcccatattttcgttatattctaagaattcccaatctttgtaatattctttcaattcgttttcagcaaaagtgaaagagaatggaagtgggcaaggcacatcatctgtggacatggcggcaacgattaaattatatccgccaacattggtatgttcttgcatatttttgatgattgacggcacacgttcacgatttaagaacataaacaccaccgttgaaacaataaaatcatagttttcttgaatgttggcggcgttaatgtcgtaaagtgcggtagaaatattaaggttttctttctctttggtttcatttaaaaaggcaatgctgttttcattgtgatcccaagaggtcacatcatagcctaataaacttaaataaagtgaattacgcccttgtccgcaacctaaatctaatactttacaaggcgagataatttttgctgcatccaccacatcgccgtgaatggcagtcatgttgtattttttactgaaataatcttcttttttgcaatagaaacctagggtacattctaggtcatcagaaagtgcttctacacgatgccatgcttgaggttcaacaaaaggaatgtggctttctggggtaaaaatatgctcggcaacaacatcgccattttcggttagctcataaaatttgatcttaccttttaatacagttaatttcccccaagtgccgacttttgtattgtgcttttcttggaacatttgtggcaatttgtcttttgtccacactggcatttgtttatagcaaattaattcgtttttcataatattctccaaacagataaatagttgagtgttatggtaggttataagtcatctattttcaacaagaaaataaaagggcaacgtaatgttgccctcatttagattgaattgattatttaacttgcatgcccgcagtgacaccattatcggcagataacaagaataaatcactaccgcccgttcctgcggatagaatcattccctcagacacgccgaatttcattttacgtggtgcaaggtttgccaccataatcacaaaacgaccttctaattcttcaggcttattataagccgctttaatgccagagaagacttgacgagtatgatcaccaagatccaattcaaaacgtaaaagtttattagattctggcactgcttcgcatttcaatacttttgccacacgcatatcaagtttggcgaaatcatcaatcgtgatggtttcagcaataggttcaacggcagaaagtgcggttggttttgcttctgttttttcagcggctttattggctgctgcaaataaggctttggtttcttctacaacggcatcaatttgttttttctctaaacgagagaataaggctttaaacggtgcaagggtatgaccaagtaatggttgatgaatattatcccaacgtaattcagcttgtaagaaggtttctgcacgctcagccagttttggaagaacaggttttaagtaagacatcaacacgcggaaaagctcaatacccattgaacatacggcttgcaattctgcctctttgccttcttcttttgcaatcacccaaggggctttttcatcaatatatttattggctttatccgttaatgccataatttcacgaatggctttattgtattcacggctttcgtaataagcagcgatttgctcggcttgggcggtaaattctgcaaataatgcttcatcttccagtttatccgcaagtttgccttcaaagcgtttcgcaataaagcccgcattgcgtgaagctaaattcactaatttgtttacaatatccgtattgacacgttgtacgaaatcgtcaaggttaaagtctaaatcttcaatgcgatcatttaattttgctgcatagtaataacgcaaacattcaggatcgatatgattcaaataagtgctggcttgaatgaatgtgccgcgagattttgacatcttcgccccatccaccgtgacatagccatgagcgaacacattagtcggtttacgatagccactgccttcaagcattgcaggccagaatagactgtggaaataaacgatatctttaccgatgaaatgataaagctctgcatcactgccttcagcccaaaattcactgaaatcaatgccttcacgctcacatagatttttgaatgaagccatatagccgataggcgcatctaaccaaacatagaagaatttatcttttgcgccgggaatttcaaaaccgaaataaggcgcatcgcgtgaaatatcccattgttgtaaaccgctttcaaaccattcttgcattttgttggcaatttcagattgaagtgagccagaacgagtccattcttttaacatcccttcaaatgcaggcaagtcaaagaaaaagtgttcagattcttttacgataggtgttgtgccagaaacagctgaacgaggattaattaaatccattgggctataagtagaagcacacacttcgcagttatcgccatattgatcttctgctttgcatttcgggcaagtgcctttcacaaaacgatcaggcaagaacatatttttttcaggatcgaataactgagaaataactttactcttaataaagccattggctttgagtttattgtaaatttctgcagtgagctgtttgttttcttcgctgtgagtagaatggtagttatcaaaactaatattgaaacctgcaaaatcacgaatgtgatcggcttttgctttagcaattaattcttcaggtgtaatgccaagtttatcggcattcagcataataggcgtgccgtgcgcatcgtccgcacagacaaaatggattttattgccacgcatacgttgaaaacgcacccaaatatccgcttggatatgttctaacatatggcctaaatgaattgccccattggcataaggcaaggcgcaagtgactaaaattttacggggttgagttgtcatttattattctcttttttagcatacaaaaattgtgcttatcttactttaaataggggattttttctagtttgaaaaactttaacttaacataccgcactttccgtgattaaatatgcccgacaaatttactctactaaataggaagttattatggcaacctacttttctgataatttgactgccgaccagcaaaaccaagttcagcagattatccaacaatttcagcatccaaccctgcaaaaggatctgattgcgcttaatactttgaaaaaagtggaaaagggcggcgatactttacgcattgaattgaaattgccttttgcgtggaattctggtgcagaacagttaaaacaagcggtttcagatgcgttgttgaaagcaacagattgtaaattaattaaatgggcggtggcttatcaaatcgcaacacttaaacgtgcaaataatcaacctgctgtaaaaggtgtgaaaaatattattgcggtgagttctggtaaaggcggcgtagggaaatcatcggtttctgttaatctagctttagcattacaagcacaaggagcacgtgttgggattttagatgcggatatttatggcccttctattcctcatatgttaggcgcagcggatcaacgcccgacttcgccagataatcaacacatcaccccaattaaagcacatggtttatctgcaaattccattggctttttaatgaatgaagacagcgcaacaatttggcgtggcccgatggcgagtagtgcattaagccaattattaaatgaaactctatgggatagtttagattatcttgttatcgatatgcctcctggcactggcgatattcaacttaccttatcgcaacaaatccctgtgactggtgcagtggttgtgacaactccacaagatattgctttgcttgatgcagtgaaaggtatctcaatgtttgagcgagtatccgtaccagtgttaggcattgtggaaaatatgtcgatgcatatttgtagtaagtgcggtcatcacgaagcgatttttggcacaggcggtgcagagaaaatggcggaaaaatacaatgtgaaagtattagctcaacttcctctgcatattcgtatccgtgaagatttagatgcaggcaacccgaccgttgtgcgagtgcctgaaaatgaaatttcacaagcgttcttacaacttgcagaaaaagtctctacagaactttactggcaaggttccgtaatcccaagcgagattttatttaaagaagtgaaataatcaaaaaagatagggctgcatttgcagtccttttttaatgggatttttaccttacccatctcaccacttcatccaatcctttacgggattttttcgcaatatcgcgtgagcgatagccaaaggttgcggcgacagaaaccgcatattcttgaggatcgaataatccttcttcggcgaggcattcattcattttgtcgtaatgaaaaccttcaattgggcaagagtcgatgccaagggctgaagctccagtaagcatatttgcaagggcgatataagtttgtttactgcaccaatcaaataaagtgcggtcgctttccagtaatttcatatcttcttcttgcagggttttgtattttgcgagggcggcttgttgttgctctgtgttcaagcctttgcgcaccattacatcctcaaaaaatgggctgtcataacgggcattttttttcgcgagaattaccacaagatgactgcaattatcaagctgatttatcattccccagctaaaaggtttcattttttcgcgtaaggttttattttgaatcactaaaaattcccaaggctcagaacctacagaactcggcgataatcgaccgcactctaaaatacattcaaaatcttcatcactgattttttttgttgggtcgtaataacgtgttgagctgcgttgatggaagagttcaagaacttgttcacgagtaagttgagtcattttatttcctctttgttaaacaaaaatgtggtgccatattaaagattagtttttgctaaaacaagggaaagattttagaatagtcagcacttttatcacagagagtgagaataatgacaagaattgcaattattcctgcgagagcaggttctaaaggaattaaagacaagaatttacagcttgtggggggcgtttctttggtggggcgtgcgattttggcagcgcaagaatcgggtatgtttgatcaaattgtggtgacatcagatggcgaaaatattttaaaagaggctgcaaaatatggcgcaaaaccagtggcacgccctgaaagtttggcacaaagtgatacacgcaccattgatgctattttgcattgcttagaaacacttaatatttcacaaggcaccgctgtacttttgcaaccaaccagcccattgcgtaatgctttagatattcgtaatgcaatggaaattttccttggaggcaaatataaatcagtggtttcagcttgcgaatgtgagcatcatccttataaatccttcactttagaaggtaccgaagttcagcctattcacgaattaacggattttgaatcccctcgccaaaaattacccacatcttatcgtgcaaatggcgcaatttatattaatgacatcgaaagtctctttgaagaaaaacgcttttttatcgcaccaatgcgtttttatttaatgccaacttatcgttccattgatattgattccacacttgatttgcaattagcagaaagtttaatttcaaaagaattctaaaaaattggccgcacttttgatctgcactccaaaagttggattaaacaaccaactaaggtgcagattttttatgaccaaatacaattttttttcaagcaacaagtcatcgagttttatcttcaaaatagtaaaaattgttgatttccctgcaggcattttcaacttgccagcagaacattgtgacattggattaatcaatttgatcatattagaatcaatggcttagcgttgttgggtaagaagtgaaattactcatctgaatttaaacttaggatgatacaatcggttaaaagtaagcaattttctgcagaacccgcttgcttacattttggtgctggaaatggctagggattaagaataccgagttcaagtgtgtgaaaggcaagctctatttatcccctcattaaggatttatttaacaatgaaattattgcttatgatttagtgcgaagcccgaactctgagcaaattacccaaatgatgaaacaagctgtagcaaggcttacaggcgcaaacccgattttacattccgaccaaggttggcagcatcagatgataggttatcaaaacatgctcagggaaaatggcatttaacaaagtatgtcaaggaagggaaatgatttagataacagtgcgatggaaaggatgataaaaaaggaatgttattatggtaaacgatttgagatgttcaaacaactggaaaaaacaattcatgagtacattcattattacaaccatgagctcattcaggggaaaccaaaatggctgagtcctgtgaatgacatagctaagcccttgaactaaataagtctaattttttagaaggtcaattccagtaaaatcaaggctttgtgatgtagtataatgacgcatgattttgattgttggtggagctggggggagttgaacccccgtccgaaattactctaccttcagtactacacgtttagtctcgtctttaatttcacttaagcatgcggacagacacgctaaacttaagctagtttgattcaatttagtgcttcgatcctcaaacggtggcttccacacgatctcgttttggtttgactccgcgttatccccgtcttacgagcggaagctggagcgcgaaggctaaatgcaggttattaagctgctaaagcgtattgttcgtcgtttgcgactatttttttgcggtttatttacgaggcctaccgcacctcgacgtgcaccttgggcttcgctaatcccgtcgaatccagaatcagccccaaaattgcgtgttagtctaacaaaaaaagaaaggtagggaaagtcgagattgattgaatttttgtatgaaagctagaataaccttaaatattgtctacttattattggcttattaccttattaacaattcatctctaaattgattggagacgatcattgattttttatggaagggaggcttgataatgtggcattatttcacgtttttttttgatgataggagctatagatttgtaaattatggcaaaattaaagatatttacgaattcctaaaaatataacacagcatatatgctataattagctcctaaactttttggaaaatgttatcttattctagtatttatcatcaatgattttataaaatttcttgcatattaaatttttatcactataatgtggtgcatatttcggacgcggggtggagcagcttggtagctcgtcgggctcataacccgaaggtcgttggttcaaatccagcccccgcaaccaataataagttcagtaaaagaaccccagttttggggtttttttctataagaaatttagtaactgggcttaggttcttatgaacctaaccctttttttatgcctgagatttaataaactatcttcttactattactaaaatagagggataagtattgtttaggataaggtttcataaggttatgatatagtgcggtgaattacaccctatataggagtagaaattggctacattagaacaaaatttacaagaaatgctacaagatgcggtaaaggatttaggctgtgaattgtggggaattgagtgtcagcgcgtgggtcgttttatgacagttcgtttatttatagataaagaaggtggtgtgacagttgatgattgtgctgatgtaagtcgtcaagtgagcgcaattttagacgtggaagatccaattgcggataaatataatctagaagtgtcgtcacctggtttagatcgtccgctatttaccttgccgcaatttgaacgctatattgggcaagatatcgctgtgcatttgcgaattccagtgatggaacgccgtaaatggcaaggtaagttagagcgtattgaaaaggatatgattactttaatcgttgatgatcaagaacaaattttagtcttcggaaacattcaaaaagcgaatgttgttgcaaaattttaaaaggagaaaaagagaaatgagtaaagaaattttactggcggcggaagctgtatccaatgaaaaattattaccacgtgagaaaatttttgaagcattagagagtgcgattgcgatttctactaagaagaagtttgaatatgaaacggatattcgcgtttcaattaatcccaaaacaggagaatttgatacttttcgccgttggttagtcgtagatgaagtaaaagtaccaacgaaggaaattactttggaagcggcgcaatttgatgatccaaatttgcaacttggagagtatgtagaagatcaaattgaatctattgcatttgaccgtattgcaatgcaaacagcacgtcaagttattagtactaaaattcgtgaagccgaacgtgcaaaagtggttgaacaatttcgtgaagaagaaggaaaaattgtaacaggcactgtaaaaaaagtaagtcgagacagtattattttagatcttggcaataaagcggaagcgatgattgcgcgtgaagatatgttaccacgtgaaaacttccgtccgggagatcgtgttcgtggggtactttataaagtaaatcctgaaggtaaaactgcacaattatttgtgacacgttctaaaccagaaatgttgatcgaattattccgtattgaagtgcctgaaattggcgaagaaatgattgagattcgtggtgcagctcgtgatgctggctctcgcgctaaaattgcagtgaaatcaaatgataagcgaattgatccagttggtgcttgtgtaggaatgcgtggtgcgcgtgttcaggtaattacgaatgaacttggtggcgagcgtgtagatatcgtgctttgggatgacaatcctgcgcaatttgtgattaatgcgatggcacctgcagatgtttcttctattatcgttgatgaagataatcattctatggatattgctgttgaagctgataatcttgctcaagccattggtcgtaatggtcaaaacgtgcgtttagcaacacaattaacgggttggacactaaacgtaatgacgactgatgagttaaatgctaagcatcaagcagaagataaaaaagtgttaaatttatttattaacgcattagaacttgatgaagaatttgctcaaatccttgtagaagaaggcttcacaagtttagaagaaattgcttatgtgccaatgaatgaattgacagcaattgatggtttggaagatgaagatcttgttgaagagcttcaaactcgtgctaaaaatgcgattacagccgcagcagtagctgaagaagaagcactgaaaaaagcgaatattgaagatcgtttattgaatttagagggaatgaatcgtcacgttgcgatcaaactagcagaaaaacaaattaccacccttgaagaactcgcagaacaaggcgttgatgatttaactgatattgaagaattaaccgcagaacaggccgcagatttaattatggctgcacgtaatatttgttggtttggcgaagaataaggagagcagtaatgactgaagatgttaaggctgatgcaccaaaaaaattaagcattcaacgcagaacaaaaacaacagtgagcagtaccacaactggcggtaaaagcaaagaagtacaagtagaagtacgtaaaaaacgcacagtaaaaactgatattgctcaacaagaagaagcaaaattaaaagcacagcaagaagcggaagcgaaaaaaattgctgaacaaaaagcagcagaagaaaaagctcgtttagaagctgaaaaagtgaaagctgaaactgctaagccagtaaaaagtgcggtagattctaaagtgaaatctgttgatcctgaaaaagagaaacgtaaagcagaagaagcagaacttcgtcgtaaagctgaagaattagctcgtcaaaaagcagaagaacaagctcgtcgtgcagtagaagaagcgaaacgttatgctgaagcagatgattcagacaatgaatcttcttcagaagactattctgattacaatctaagttcaagatatgcacttgaagcagaagatgaagaagatcgtcgtaatgaaaatcgtggccgtggcaaaaataaagtagcgaaagcgaaaaaaggcggtcgcgacgatgaaaatagcaaaaactcgaaaaacgagcgtgaatctaatcgtaaaaatcaaaaagacgctaagtttggtaaaggtaaaaatggcaaaaaaggtaccccacttcaacaagcctttactaaacctgctcaagtagttaaatcgaatgtagtcattggagaaaccattacggttgcagaacttgcgaataagatggcggtaaaagctacagagattatcaaaatgatgatgaagatgggcgaaatggttactatcaaccaagttatcgaccaagaaaccgctcaattagtagcagaagaacttggtcataaagtgattcttcgtaatgaaaatgagcttgaagaagcggtattaggcgatcgtgatgtaaacgcagaaaaagtaacccgtgcgccagttgtaaccatcatgggtcacgttgatcatggtaaaacctctttacttgactatattcgtaaagcgaaagttgctgcaggcgaagcgggtggtattactcaacatatcggtgcgtatcacgtagaaatggatgatggtaaaatgattactttcttggatacgccaggacacgctgcgtttacttctatgcgtgcacgtggtgcaaaagcaacagatatcgttgttcttgttgttgcggccgatgatggtgtgatgcctcaaactatcgaagcgattcaacacgcaaaagcagcgggagcacctttagtggttgcagtaaataaaatcgataaaccagaagcaaatctagatcgtgttgagcaagaattattacaacatgatgtcatttctgagaaattcggtggtgatgtgcaattcgttccagtatcggcgaagaaaggtacaggggttgatgatttattagatgcaatcttacttcaatctgaagtgcttgaattgactgctgtaaaagacggcatggcaagtggtgtagtcattgaatcttacttggataaaggtcgtggccctgtggcaactatcttggttcaatcaggtacactacgtaaaggtgacatcgtactttgtggttttgaatatggccgtgtgcgcgcaatgcgtgatgaaaacgggaaagaagtggatgaagcagggccttcaattccagttgaattattaggtctttcaggtgtgcctgcagcaggtgatgaagcaaccgttgtacgtgatgagaaaaaagcacgtgaagtggcgttatatcgtcaaggtaaattccgtgaagtgaaattagctcgtcagcaaaaagcgaaacttgaaaatatgtttagcaatatgtctgaaggcgatgtggctgaattgaacgttattgtgaaagcggatgtacaaggctctgtagaggcgattgttcaagcgttaaatgaactttctaccaatgaagtaaaagttaaagttgttggttcaggtgtaggtggtattactgaaactgatgcaactttagctaccgcatctaatgccatcattgttggctttaatgttcgagcggatgcaacagctcgtcgtgtcattgaagctgaaaacattgatttacgttactactcaatcatctatgaattgttgaatgaaattaaagcagcaatgagcggtatgttagagcctgaatttaaacaagaaattattggcttagctgaagttcgtgatgtattccgtcatccgaaatttggtgcaatcgcaggttgtatggtaactgagggtgtagtgaaacgtaacaacccaatccgtgtattacgtgacaacgtcgttatctttgaaggggaattagaatctcttcgccgtttcaaagacgacgtatctgaagttcgtaatggtatggaatgtggtatcggcgtgaaaaactacaacgatgtaaaagtcggcgaccaaatcgaggtgtttgaagtggttgaagttaaacgttcgatttaatctttaacaaaataaagggcggttaaaaatcatagtgtttttaatcgcccttttgttattaaataaaccgcatcaaaattataaaccagttaaatcctcagcaatttcttcagcttgtttaatcacataagttaccgcttcttcctgtttatcaggcgggtatttatatttttgtaaggcacgtcgaacgagtaatctaattcttgcccgcaccgcttctttgtactgccagtcgattgtgaccgattttctaagtgtttccgtgatttctttcgccagtttagaaagcacttcatcacccatcaaatcttttgcactttgattttgagatagagcttcatagaaggctagttcttccttggttaatcctagttttttccctaatgctaaacgttcttggaaatcttggctcattttaaagagttcgtccaaaatctctaccacagtcaaattgtgattgtggtattgattcaatgcttccttcaaacgcttttcaaaatctttttgcaatgttaagtttgtgcctgatttaactttaatttcacttgccaaataacgctccatcgcgctaacccataaatttttagttgggctattttttacagtttgtaaaaattcctcggaaagtaagctaatttgtggttgtggtttttctagcagatcgaataaatcaatcacgccttcagaatacacagtttgattaaccagttttttcaataaaatctgtctttcatttgtgcctgtgcctttttgttcacgtttagttaaaattgcccgtacggcatcataaaaggcgatttcttggttatacggctcaacttcagctaatgcgccgcacagcatatagcctttttttaccaagcctgccgttttcaaaaaggcttttttacgtggttcggtttcttttttattaaaccaatgctgctcgtgcgctttgccatcaaacgataattgatcaaggcttaaaatatggttggcggcaaaacgaatcgccatcaaaagatcattcggattatctttttctaaggcagcctgaacatcaaaggttttcccttcaactggcgttgcaaacaggctgcggataacttctaaatgctctttcattttaaagaatacatcaatcacgctatcagccagtttgcccttgccttgtgagtttgtatattgccgagtggctttttcgagctcgtcagcaatgcctacataatccacaatcaagccaccattttctcggcttttattacggaatacacggtttactcgggcgatggcttgcattaggttatgcccctgcatcggcttgtcgatatacatcgtgttacagcaaggcgcatcaaagcctgtcagccacatatcacgcacaatcaccaccttcagcggatcgttcgggtctttaaagcggcgttctagcgtttgtttttcctgtttactgtaaacgtgtttctgcatttcagacgcatcggaagcagaacctgtcatcacaattttaatcgccccttcgttaatattgtccgaatgccattcagggtgcagagcgatgatctgattatacaaatccacgcaaatctgacggctggaaaccaccatcatcgctttgctgtccaccacttcattgcgtttggcaaaatgttgcacaaaatcgaccgctaaatcatgcaatcgagcttctgagccgagcaatttttctcgcaagcgtaatttcgggtttttttcgccttccagcagttcatcaatttctgcaaataattcatcgtgattagcattctccgctagcttgatttggcgtgcttcatacacaatcggcacggttgcgccatcttccaccgcatcttgcaagtcataaatggacacataacgaccgaacacatcttgcgtgtccttatcttcaaggctaattggcgtacctgtaaaaccaataaacgaggcattaggtaaagcatcacgcaaatggcgggcgtagcctgtctgaaacttgccgttatgcagcttttgcgtaaagccatattggctgcggtgagcctcatcgctgatcacaataatattgttgcgctcatttaaaatagggaagcggctttcttcctcatttagggcgaatttctgaatcgtagtaaaaaacacgccgccgacttcattttgcgcgagcagttggcgtagttgatcacggtcttccacttgttgcggtgtttgcttgattaaatctttgcctgaagaaaaggtttggaagagctgaccatctaaatcgttgcggtcggtaaccactacaatggtaggatttttcaattcaggctgtgcaagcagtttgcctgcataaaacagcatcgaaatcgacttgcccgaaccctgcgtatgccacatcacaccaatgcgtttatcgccttgctcgcttgtggcaaaaatcgtggattctactgcttcatttacgccgtaatattgatggtacgccgcgatttttttaatggttttgccaacggaatctcgttcaaacaagacgaaatagcggatatagtccaataaatccttaggctttagcaagccattaagcaggctttgcaactcatcgtcaaaatataaccgtgcgcttttatttttttcatcgaccactttccacggcgtaaagcgttggaaatctgccgaaagcgaacccaaacgggcgacaataccgtctgaaataatcagggcttggttgtaaacaaacagctcggcaatttcatctttataggtttcaaactgattaaacgcctgcaacaaatccgccgattcacgtagtggatttttgagctcaaataccaccaacggtaagccatttacaaagccggtaatatcgggaatccgcttgccccctttacggctgcggatttccaactgattgacggcgacaaaacggttgtttccccaatgctcgaaatccaccaaacgcgccatctcgattttctgctcattttgtccgtggctattgggagcctgatattccacccgcacgccatcacgcagcagtttataaaacgcctgattgcgtaccaccaagtcgccaatatcgcttttcgtcgccgatttcactacagaatccaccgcactttcaggcagctgaggattaagtttacgcaccgcctcacgcagttgctcaacaaagactacgccgctcaaatcgccacgggcaaacttgccctcatgaacaggcaagtctttaccgtagcgatattcccaaccgagggattgcaggcgttgaagggtaagttgttcgatgtcattttcgttgagcataggtgttccttacttgattttataagaggatcggcattactaaaatcatcccatttccttttttatgaaagctggaaatgttgttgagtatcatctccacaggtttattttctagtgttgataatttagttcaacatcttgttcaagcttatttttataattttctaatttttggataagttttatttgcttatctttaatggaattcagggaacgcattgttcgctcgtaacgtattctttccgtaacaagttttttttctaatgtcgctaatttaagttcttgctcagccttatatttattttcaagacgttgtagtttttgctctaattctataaccttatcttcttctttaagctgtgatattttgaccataataataggtatagcaatcccaaatgagatagcaataaaataacaaaaaactgtacctaccattgatatactcctatttattcttgatattcttaggtggaaaaggaatcatgcttgatgttagcatcgcaatttcttgatttatatagacaagattttcttgcctttcattattttcatttgtgagttgttgaatttctgcatcccaaatagcttgttgtttttctaatgcttcttttttttcaattacttcttgtgattctgttttttttgatatttcatctatttttatgttaatttcacattcttttgatgaaagactgttttttgaaaaaaaacagaataaataagataaattggcacaatgataaatgacataataaaaagtgtatataaaaacacgaaaaatgggtgccaagggttactaagcatggccataataagtattaaaatactgaaagatataatccaagggcctattagtgcaatcattaatttcctcctatgttttaaagtattttctattgattaatcctgatattctaaattaatctctgcaatcgcattatcaatgccaatttcacaaagttttatttttcctaataaatcaggataaattgttgaagcatcaatattaattgaggcaagataagctaaaacatcttttcttaacttactggaaattaacattttacttaatctgtgaaaaacatgtccattgccaaaatttgtgttcagtttggagatatcttcaaattcaatcgatgataattttgtaaaaacacctttttgtgcattaatccgatttccaattttaatttctggctcaataatgagttttcaccaaaattaaaaaactcatttaattcataaataacacgatattggttttcttcctgactttcaaaagcaaaataaagtgcaacaaagaaagattttgtccaatctaataaaggtgtttttaactgataatgttgtgcaaatgcccaaatattatcatctttgagattgcttggtaataaaatataaccatcaatactttgattgataagaatacgtttgcaatgctcaaaatatttttcttgcaatttttggtaatctttttcaatattgaattgcttaccaaatatctttaaatggcgctctaatgtagattccaaacgatactcaaccttactatgtccacgataatagctcgcataattagttgaactatcacttgctaagggaatttgtttgaattcatctggtgtttcttcatcaaatttataactataactataactaaaaacaaatcttttgaattcatctaacgtattgatttcaccaacaactgggactttatcttttcctataaatttaaaatcttccattttaaatttctccatttaataatttaggtaataacaaatctctagtatctttcaatacatcaatttcagatagaagctgttttcttttttcaaataaagaagacacatatttttgatgtaattcaagtaatttgaaatcaggtactaataaggtgatttgtttcaaatgtgtaggtccaaagttacgctgggcagaacctgaagctcggatttccaattcatgttgtaattgattctcaacaaaaccagcaatgaagcctaatgtgcttttatttttaataggacggaaacggataacacttgtattgagtgataaaggcaaatgttccttcctaacaaaagcaaatcgtcctaatgttcctgatgtcgaaacaacaatatcgtcttcttcaagctggaagtgtttatattttccaaaagcttcttccttcgtgattttatttgcggttgttaatgtcaggtctccattctggatgcagcgaatattgataaacttgataccatcttcttcatctgtatattgccaattacgaatgcctggtccttcaagaaaatcaatgatttcaggtagtgctttaatttcccaccccttcggcacttcaaccccatcaacctccaccatctcacacggaaacgctttggcggtttcggctaattcggcgtagcggtcaggctgtgtttgtgaaagtgcggtcagttcttcgggtgtttttccgctgattgcctgcatggctgccagctctgcttgttcaaggctaaggccgtctgaaagggcttggactttggcacgcacgggatcgaaatcgacaaaccagcttttaaacagggcttgagcgatttgttccaaggtttggttgatttgggtgttgaggtctatttttttatccaattcagataatatatccgcgatttttttttgtttttctaaattaggaatataaaaagaaaattctttaattgtttttgcactaagattttgttgtgcagcccctgttgcaagactttgaatttcttttttgtataaacgcagtaaatagaaaataaatctataatcggcttttttaggatcaataatcaatgcacaacaagcctgattacaagccatttcttttcctaaaattccaagctctccgactgttgctccatacattgcaagaagaatggtatttacaggaagtaattttgcagaagatttctttatggcttcttctgtgattttttcttctgattcaaatatgtatccattgtttagttcttttgttttaatccaatttatgtttccgtttttatataatttaggattttgtcgactaggtgttccacctgatgttatttttaaacaaatttcttccaaagagtatttttgccaatttttatctgtggctaagctattaaatgccataacccaatccccccaaattcttcttaatctccgcttccaactccgcacttttcgcaaattgctccttcaaaagagcggtcagattttgcattttttctgcaaatggcacgccgtcgtcttcttgttctgcagtgccgacgtagcgccctggtgtgaggacgaagtcgttatttttaatctcttctaaagtcgcggatttgcagaaagcggcttggtcttcgtagccgtctgatgtttgccaagcatggagggtatcggcaattttggcgatgtcgtcagcggtgaaatcacgcaagactcggtctttcatatagccgatttggcgggcatcgataaacaacacttcgcctttacgttttttgttgcggtttaaaaaccaaatacaggcggggatttgggtgttggtgaagagctggccaggcagggcgaccatacattccaccaagtcggcattgatgatggctttgcggatttcgccttcgttgttggtttggctgctcatagagccgttggcaagcaataatgccattttgccgttgggcgagaggtgataaatcatgtgttgcagccaagcgaagttggcgttgcctttgggcggtgtgccgtatgcccaacgtggatcatcggcaagggattcgctccaccaatcgctgatattgaatggtgggtttgccataatgaaatccatctttttgtcgatgtgttgcggctgggtgaaactgtcggcgttatgtttaccgaagtcgtaatcaatgccacgaatcgccatattcatggcggcaagtttccaagtggttgggttgaattcttgcccgtagatggaaacgttgttgatgttgccttgatgggcggtgataaagcgttcggtttgcacgaaaaagccgccgctgcccatggctgggtcatacacgcggcctgaatagggctcgagcatttcgacaatcagggaaacgatggatttcggcgtgaaatattgtccgccgcgtttgccttctgcttgggcaaagcgaccgaggaagtattcgtaaacgtggccgagaatatcttttgcacctaaatgtacaggctcgccgttgtaagttgggcgggtaaaatgggtatcggagaacaagataatcagcccgcgcagggtgtcttcgtttacggcatagccgctgatgcgttggaggacgcctttcagtttttcgttgtctttttcaatggcatcgaaggcatcgtcaatcagttttgccacgccagaaaattttccaccccaaggcaattctgccccagtgttgagaatagagacttcttgtaaggcttgccaacgtgcagaagctggcacccaaaatacgttatccgcggtgtaataatcacggttttctagttctgcggttaaggcatcttgatattcttcttcagtatcaaaaaaagtgcggtcaagatagagtgggctttcagtatcggaaagttccgcctgaattttttcctgttgatgggtgaaactatcggaaatgtattttaagaagataagaccaagaacgatatgtttatagttagcggcatcaagttgttggcggagtatcagcagatgcccaaagtttttcatctaattcatttaaaaatgcttgttgtaatgcgtgattttcatcgacaatcttggtcgtctggtctcgcttgcataaattatgccctctgtaaagtgatttttatcggaagtttgaatattcaaacaaattatcaggtgttattttatcgaaaaacagtattaggttgaaagggatttttgcgtgctaaattcaatgatttccagtagaatgaggcacttttataaataaggaataactatggcaagagaatttaaacgtagcgatcgcgtcgctcaagaaatacaaaaagaaatagcagtcattttacaacgcgaagtgaaagatccccgtattgggatggtgacggtttctgatgtggaagtgtcgagtgatttatcttacgcaaaaatctttgtgacttttttattcgatcacgatgaaacggcaattgagcaaggcatgaaaggcttagaaaaagcatcgccttatattcgttcgttactaggtaaagcgatgcgtttacgtatcgtgccagagattcgctttatttacgatcaatccttagtggaagggatgcgtatgtcaaatcttgtgacaaatgttgtgcgtgaagatgagaaaaaacacgttgaggaaagcaactaatgtctagacctcgtaaacgctggcgtgatgttgatggtgtgtttttgttggataaaccacgaggcatgtcatcaaatgacatcatgcaaaaggtgaagcgtttatttcaagcgaataaagcagggcatactggcgcactcgatccgttggctacgggaatgttgccaatttgcttgggtgaagcaactaagttttcacaatttttgcttgatgccgataagcgttatcttgttacggcaaaattaggcgaacgtaccgatacttccgatgcagaagggcaagtcgtggaaactcgtgaagttcatgttgaaactccgcaaattttgaccgcacttgaacaatttcatggcgatattttgcaagtgccgacaatgttttccgcactaaaacataacggcaaaccgctttatgaatatgcgcgccaaggtattacggttgagcgtgaggcacgtccaattacgatttttgaacttaattttattgaatatcacgcaccttatttaaccttagaagtgcattgttcaaaaggcacttatattcgcactttagtagatgatttgggtgaagtgctaggttgtggcgcgcatgtgacaatgttacgccgtacagccgtagcggattaccccgtagcagaaatgatgccaattgatgagctacaactgctcgctgaaagttttccattaagtgaattggatcgtctattactgccaaccgataccgcagtaagtaaattgcccgctttgcatttggatgcagagcagagtaaagccattggttttggtcagcgagtgaaatttgctaatgaacagcaattaagcggtcaagtgcggttattttcagcggagaatttattcttaggcgtagccttaatcgatgggaatattattcgcccacaacgcttaattacacaatccgcataacttcattgcctttcctgtaaaattctagtaatctccttgtaattaattttttacaatatatgtaagataaacattacaggtaagttttatggaagcccttaaagatttacgttctgaaattgattcgcttgatcgcgaacttatccaactttttgctaaacgtcttgagttggtttctcaagtcggtaaagttaaacatcaacatggattacctatttatgcgccagagcgtgaaatagcaatgctccaagctcgtcgtttagaggctgaaaaagcaggcatttcagccgatttgattgaagatgttctacgccgttttatgcgcgaatcctatgccaatgaaaaccaatttggctttaaaactatcaattctgatattcacaaaattgttatcgtgggcggttatggtaaattaggtggcttatttgcccgttatttacgtgcatctggctatccaatttctattttagatcgcgaagattgggcggtggctgaaagtattttagcgaatgctgatgtcgtgatcgtttccgtccctattaatctcaccttagaaacaattgaacgcctaaaaccttatttaacggaaaacatgctacttgcagatttaacctctgttaagcgagaaccgctagcgaaaatgcttgaagttcattctggtgcagttttaggtttacatccaatgtttggtgcagatattgcaagtatggcaaaacaagtggttgtgcgttgtgatggacgttttcctgaacgttatgaatggttacttgagcaaattcaaatttggggtgcaaaaatttatcaaaccaatgccacagaacacgatcacaatatgacttatatacaagccttgcgccatttttcgacttttgcgaatggtttacacctttccaaacagcccattaatctcgctaatttattggcactttcttcccctatttatcggttagaacttgcgatgattggtcgtttatttgcgcaagatgcagagctttacgccgatattattatggataagtcagaaaatttagcggtaattgaaacgctaaaacaaacttacgacgaagccttaactttctttgaaaataatgatcgtcaaggttttattgatgctttccacaaggtgcatgactggttcggcgattattctgaacaattcttaaaagaaagccgtcagctattgcaacaggcaaatgatttgaaacaagggtagagaaaagtgcggtgaaatttcaccgcagttttttactgtctcgccaatcttaaattttcaggtaaattctcaaaattagagcggaatggattaatgtctaatccgccacgacgagtatagcgtgcgtaaacggtgagtttttctggttttgcgtagtgcattaaatcgcaaaaaatacgttcgacacattgttcgtggaattcattatgctgacggaacgatacaacgtaacgcaataatttttcctgattgatttttttaccaacatagtgaatatgcaaggtgccccagtctggctgattggtaatgaggcagttagatttcaataaatggctgactaatttttcttcgacaatttcatccgatacgcaatctttcagccaatcagcgttgaattcgtagctagtaatttcaatatcttgttcatcaatgcaatcgccttgtaaatgatcaattttttgagaatcataaactgccattggatttaaccgcacttttacatcgccttgagcacattcgattaaatcgcgttgcatagtttgttgaacggcgttgaagtcggcaaatttgctttggttaaagctatttaaataaagtttaaaactttttgattcaatcaaattttggctttgataatccagataaatatctgcgatagccacttgtggtaagcctttttcgttgagccaagagatttcataagccgtccaaatatcggcgccgatagtaaatggttggttttgagtaatgcccaatccatcacgatttaacgcgcgtggcacaggctgtaataaagtgcggtcatattgagaggcgtattccgttttttgaccgagttttaaggattttaagctgttgtcttgataattcatcttttctccgattaggtgttcgagttttgtaaatttcgacactttataaattaattacaaaaaattccacgatagattcgaaactaatcgacaggtatcgcatttaaaatacaaggtatcaaaaatcgcattttttaacgcccaatttgcaccacaagaagggcagcaacgggatttttcagattctaaagattgcccacctacacgatataaataatagtaagtcggtatgcccgtttctttttctatttcttgggctaaatatcgtccgtgttttgaaagcgtggcttgggtgctccgaaatttctnnnnncattccattcattaattaattaatgaatgaatgnnnnngtctggctgattgtaatgaggcagttagatttcaataaatggctgactaatttttcttcgacaatttcatccgatacgcaatctttcagccaatcagcgttgatttcgtagctagtaatttcaatatcttgttcatcaatgcaatcgccttgttaaatgatcaattttttgagaatcataaactgccattggatttaaccgcacttttacatcgccttgagcacattcgattaaatcgcgttgcatagtttgttgaacggcgttgaagtcggcaaatttgctttggttaaagctatttaaataaagtttaaaactttttgattcaatcaaattttggctttgataatccagataaatatctgcgatagccacttgtggtaagcctttttcgttgagccaagagatttcataagccgtccaaatatcggcgccgatagtaaatggttggttttgagtaatgcccaatccatcacgatttaacgcgcgtggcacaggctgtaataaagtgcggtcatattgagaggcgtattccgttttttgaccgagttttaaggattttaagctgttgtcttgataattcatcttttctccgattaggtgttcgagttttgtaaatttcgacactttataaattaattacaaaaaattccacgatagattcgaaactaatcgacaggtatcgcatttaaaatacaaggtatcaaaaatcgcattttttaacgcccaatttgcaccacaagaagggcagcaacgggatttttcagattctaaagattgcccacctacacgatataaataatagtaagtcggtatgcccgtttctttttctatttcttgggctaaatatcgtccgtgttttgaaagcgtgctttggtgctccgaaatttctgccaaagattgttgttctaataccgcaccattcatttgtagttgatcgcaggcttgccaattttcttgccatttaatcagatcttggcttaagtgcggttgatttttcaactgtttatacaacggaattggtgcgaaattttctccactatgaatcggcgagcaactttgtaaatgggttgtgtaaagcacttgccaagctggcgacgcattttctgctgtttgatctgaattgaaatcatcrcccacaagttgaaaaccatcaaaaattacaccgcacttttckgcttcttgtaatgcgcgattcacttctgcrttattattttgygggaaaagactatcttgctcagggcaaatgacacgcatagcaaaaccttgtgygccatcttcttccgctaaatataaaggaatttcacgtccgataatttgcccrttataccgccattgatcgatcactgcattgagtaaacgactttgtgattcaatattattttcgagcgcagtcaggcgaaaataggtttcgattaaatacataaattttttaattgctgtccgatttggtttaagccgtttaaacgcatttcacttaaacgttgtgaaatgccgagttcgctaaaaaakrcartaatatcaaatgtattcaattcatccgctgttttaccattgattttattgaataaaatccaaagcaagccattcataattctggcttcgctaaatccgctgaattgaaaagtgcggtcatgtttaggcataatttgaaaccacatttgtgcttcgcagccagtaataggttgcatttgagcgagttcattatcgcttgggcgaggtaaatttttgcctgcttgaataatcaggcgatagcgatcttcccaatttttagcttgttttaattgttctatcattgtaataaatccagtgctttatctaaggcggtgaagaatgcctctacatctttttttttgcnnnnncattccattcattaattaattaatgaatgaatgnnnnncggttgatttttcaactgtttatacaacggaattggtgcgaaattttctccactatgaatcggcgagcaactttgtaaatgggttgtgtaaagcacttgccaagctggcgacgcattttctgctgtttgatctgaattgaaatcatcgcccacaagttgaaaaccatcaaaaattacaccgcacttttctgcttcttgtaatgcgcgattcacttctgcattattattttgcgggaaaagactatcttgctcagggcaaatgacacgcatagcaaaaccttgtgtgccatcttcttccgctaaatataaaggaatttcacgtccgataatttgcccgttataccgccattgatcgatcactgcattgagtaaacgactttgtgattcaatattattttcgagcgcagtcaggcgaaaataggtttcgattaaatacataaattttttaattgctgtccgatttggtttaagccgtttaaacgcatttcacttaaacgttgtgaaatgccgagttcgctaaaaaaggcaataatatcaaatgtattcaattcatccgctgttttaccattgattttattgaataaaatccaaagtaagccattcataattctggcttcgctaaatccgctgaattgaaaagtgcggtcatgtttaggcataatttgaaaccacatttgtgcttcgcagccagtaataggttgcatttgagcgagttcattatcgcttgggcgaggtaaatttttgcctgcttgaataattaggcgatagcgatcttcccaatttttagcttgttttaattgttctatcattgtaataaatccagtgctttatctaaggcggtgaagaatgcctctacatcttcctgcgtattataaggggcaaaagaaaggcgtaatgtggtgcgttcgcctaagcgtgctaaataaggctgggcacaatgttcgcccacacgaagtgcaatattttgttcgctcaaaagtgtagaaagatcagaacagtcaatgccgtcaaatataaagcaaacaacggtgcttggttgaggagaatcgaataatcggcaattctcgtaagattttaaccgcactttgacggattcagccaaagatatagcgtgctgttctgctgtggtaaaatcccatttttgtagccaatccagcaccgcattaaagccaataaccccagcaatattgggtgtgccagcttctaaacgataaggtaattcggcaaaagtaatacgattatttgacacacgctcaaccatttttccaccgaaaaagagcggttgaagttgagaaagtgcggttaattttcctgttaaaacgccaagtccatttgggccataaattttatgggcagaaaatgcgagaaaatcggcatctaaatcttgtaaatcaattttgatatgactaatcgcctgtgctgcatctactaaaaccaacgcatgactatgttttctaaccagttgaatcaggcgtttaatcggctgttctgtgcctgtgacatttgaaacaaaattcagcgcaacgagttttgttttttcagaaagggtagaaataagcacattttcatcaattagccaattatctaaaatcggtaaaactcgaatttttgcaccgcactttttcgccgtttcatgccaagtgacaaaattagcatgatgatctgcttggctaatcagaatttcatcttcggcgtttaattgcggtagcaatccatttgccactaagtttattgcgtgagttgtacccgaagtccaaataacagcgtgtttatcttctgcatgaacccattctttaacctgtgtgcgagcctgttcatattgcgcagtttgggcagcatcatattggctgcgatgcaccgaacctgcagacgcataaaattcagcggtgcgatcaattaacacttgaggtttcaacgcggtggcggcgttatctaaataaataaccgcatcttcacgttggaaatagggaaattcttgacggaacgtttgataatcaaaagccatattgatttttctcttgtctgcgccattgacttggttcaatcggattattatctgcccaaagaccaattcctttggcttgtgcattttcttgcgcttgaagataaatcggatcatgggaatattgcttataagcccatgccataccctgtttaaccatttctaaattaatatttttatcttgataataaacaatcgccaaggttcgttgatagcgatcttttccttttagtgaaagacgtacgtttttttgataaaccagatcagacaaggtttttttcgatttttgcccaaaggcttgagatttttctggcgcatcaatttcggctaaacgaactttaatggatttattgcctttagtgaggcaagtgagcgtatcgccatcactaattttaaccacacgacacgtatttttttcgcgagaacaagcagaaagtacggtaaaaataagtaataaactcgtcaatagtatttttcgatttatcattttgcaaagtttttgatctaagtctggttattttaccgaaaaaatggctcaagttagcaaaaaaaagcgtaaaataattttgaaatattatgaaaatagttgaaaaggttgtatatgattcaaaaattatttttattagttcgttcgttggtcattttatctattatgttatatctcggaaatcttattgcttattacattccatcaggtgttccaggaagtatttggggattgttattgctctttttaggtttaacaacacgagtgattcatttaaattggatttatttaggcgcaagtttgctaattcgttttatggcggtactttttgtaccagtgagcgtgggaattatcaaatattctgatttattgatagagcaaattaatattttgcttgttcccaatattgtgagtacttgtgtcactttacttgttataggatttttaggtcattatttgtatcagatgcaatcttttacacataaacgcaaaaaagtaataaaacgtagagaaaatcaggtaaaacaagcgaattagtatgttaggaaagtttatatgcagcagtacattatttatctttatacatttttaacaattttcgggttttggctcgcactacaaattagcaaacgttggaagtcaatgatttttaatacttttgttttaacagtattaattttggcggcgattttagtgataggaaagattccttatgatgattatatggcaggaaatgcgcctattaataatttacttggcttgagtatcgttgctctcgcattgcctctttatgaacaacttcgccaaattgccagacaatggaaaattattctttcaacggtggttatagcctcttttttggcgatgttaagtggcgggcttttagcatttcttttaggctcaacgcccgaaatggtcgctacggttttacctaaatccatcacaatgcctattgcgatggaagtttctcgtcatttaggcggcattcctgccgtaactgcagttggtgttgtggttgcaggtttgcaaggatcgatatttggttatcttgtattaaaaaagttgggtgttaaacatcaagaagctattgggctttctgttggttcggtttctcacgcgctcggtacagtaagttgtatggaaacgaatccaacagcgggaagttacagttctatttctcttgtgctttgtgggattattagttctattctcgcgccatttgtatttaagctgatttatttctttgtttaaatatcaataaaaattcaaccgcactttattcattctagattttgtttgttctagataaagtgcggttgttttttgcgctaaatgattagataatgcagaaaaacgaaataaaacaaagcgatatgaaaccacttatcattgattcttcttggacagaacgttttcttcctgatcctccacgtgaaaaagataatcgcccaccatttcgtcgtgatcgtgggcgaattttacattctgccgcctttcgttgcttgcaagcgaaaacccaaattcatgcgattggcgaaaatgatttttatcgcactcgcttaacccattctttggaagtggctcagattggcagtagtcttgttgcacagcttaaatttttagaaacttttgaaagcctttcgcaaacattaaatattgataaaaacgagttgcaaaaacaattaaaacctttattgccgagtaacgatcttattgagagtttgtgttttgcacatgatatagggcatccaccttttgggcatggtggcgaaacggcattaaattatatgatggcagagcagggcggttttgaaggcaatgcgcaaacctttagaattttaacaaaacttgagccttacactgaaaatgcagggatgaatctaacacgtagaacactattgggtgtcgtgaaatatcccgcattgttagatgtggcttcgcctcaatatgcagaacttaatttttctcgcaatattgatcctcgttttgtgcgtattcacgattggattccaggaaaaggcattttccgtgatgatttaaaaatgtttaattggttgctggaaaatctttctgaaaatgaccgcactttattctgtcaatttaaaaaagtgcgggaaaatccagctgaatctttacatactcggtttaaatcactggattgcagcattatggaattggcggatgatattgcctatggcgtgcatgatttagaagatgccattgtgactggcatggtaaatcctcatcaatggcaagcggcacattctgcattgaaacaaattccatcagcttggttgcatgaaaatattgattctattagccaacgacttttctctgataaacattttgaacgaaaacaagccattggcgcattggtgaacttttttattactaatgtgcggtggaaattaacggcaaattttgatgaacctttgttacgttataacgcagagttgtcacctgaagtgattgctgcacttggtgtatttaaaaaattcgtttgggattatgttattcgcaatgtggatactcaacgaatcgaatataaagggcagagaatgctaacagaaatgttccaaatttttgaatctgatccagagcgtttattacctcgaaatactgcaaatcgttggcgtaatgcccctgaagaaaggaagaagcggattatttgcgattatattgcaggcatgtcggatgcacacgcattgcgggtatcaacaactttgatttaagagagaatcccatcgaattgatgggattttttatgcaaaccgtataaaatagtgcggttaattttcactgaatttttatggggcagttgtggcattaattagtttaaccaatggatatctttcctttagtgatgcacctttgttagatcacgcagaactacatattgaaccgaatgaacgtgtttgtttagttgggcgtaacggtgcaggtaaatcaactttattgaaaatcatcgcaggcgatgtgcttatggatgatggcaaaatccaatacgaaaaagatcttgtggtttctcgtttagaacaagacccaccgcgtaatgcacaaggcaatatttttgattatgtcgcggaaggcgtagggcatttaacggatttattgaaagaatatcatcagatttctgttcaattggaagaaaattacagtgatcaaattttaagtcaattagagcaagttcaggctaaattagaacacgctgatggctggcgatttgaaaataaaatcaatgaagtattgttaaaactaggtttaaatccaaacacaaaattatccgcactttcaggcggttggttacgcaaagcggcattcgcacgtgcattggtgtgcgatcctgatgtgttattactcgatgaaccaaccaaccacttggatgtggaagctattgaatggctggaaaatttcttactggatttccaaggtagcattgtatttatttcccatgaccgttcttttattcgcaaaatggcaacacgtattgtggatttagatcgcggtcaattgcagtcttatctaggcaattacgatttatatttaaccacgaaagaagaaaatctacgcgttgaagccttgcagaatgaattatttgataaacgtctagcacaggaagaagtgtggattcgccaaggtatcaaggctcgccgtacaagaaatgaagggcgagtgcgagcattaaaagcgatgcgtgaggaacgccgccaacgccgtgatgtaatgggaacagccaaattacagttagatacctcaagtcgttcaggcaaaattgtctttgaaatggaaaatgttagctatgaagtcacaggaaaaactttgttaaaagatttttcaacaacgattttacgtggagacaaaattgcccttgttgggccaaatggctgtgggaaaaccacgttcattaaattattgttgggggaaattcagccaacatcaggaaaaatccgttgtggtactaaattagagattgcttattttgaccaataccgtgctgatttagatcctgaaaaaaccgtaatggataatgtggcagatggtaaacaagatattgaaatcaatggtgtaaaacgtcatgtgctagggtatttgcaagatttcttgttcccaccaaaacgtgcaatgaccccagttaaagccttatcggggggagaacgaaatcgtttattactcgcaaaattgttactcaaaccaaataatttattgattcttgacgaaccaaccaatgaccttgatgtagaaacattggagcttttagaagaaattttgactgattatcaaggcacattgttaattgtgagccatgaccgtcaatttatcgataatactgcgacagaatgttatttattcgaaggtgaagggcatttgaataagtatgtgggaggattctttgatgcgaaacagcaacaagccaatttttgggcaagcaaagcggtggaagaacaggctaaggcgaagaaatctgaaccactaaaagaagaaagtgcggtgaaaaatgaccgcacttctaagccgaaatccgtgaaactttcttataaagaacaacgtgagttagaacagctgccacaacttttggaagagttggaaaccaaaatcaccacactgcaagctgaaatagccgatccagcatttttccaacaagctcacgatattaccgacgctaaattaaaagaattggcggatactgaagccgaattagaaacagcatttttacgctgggaagaattagaagaaaagaaaaatttggctgacggtaaatcttaaaaaataacgcccgaaagggcgtttttttatgtattttcaagatgatcttttttcaaaatattttcttcatcaagtattgataaacgagcgatagcgtttcgataagaaatttcaagggtttctctgctggttgccattacgccttgatccactaaaaatccatcatttacatcatatacccagccgtgtaatgagagtttttgtccgcgttcccaagcactttttacaattgatgtgcgccctagattgtaaacctgttccgctacgttaattttagttagcatatcggcacgtttttctggagaaagtttaccgagaagatgaccgtgtttaaaccaaatatcacgaatatgaagaagccagttgttgataagccctaaatctttatctgccatagcagcgtgaattcctccgcagttggtgtgaccacagataataatatgttcaattttaagcacatcgacggcatattgcacaacagaaaggcaattaaaatctgtgtgaattacttggttagcaacattacggtgtacaaaaagctcgcccggttcaagatttgtcaatttttcagcaggcacacggctatcagagcaaccaatccaaaggtaatgtggcgtttgatgatccgcaagttctttgaagtaagtagaattttcttctttcattctttgcgcccaactgtaattgttggcaaagagttgtttaattttatccattttactttccttaaaattctgaaaaaattgaccgcactttggcgtaagtgcggtcaatattaaagttaaattgaattagaaattcgcatttcttggtgcgcgtgggaatggaattacatcacgaatattttgcacgccagttacgtagacgattaagcgttcaaaaccaagaccaaaaccagaatgtggaacgctgccgtatttacgcagatcgcgataccaccaataatcatctggatttaatcccatttcttccatgcgtttatcaagcacctctaaacgttcttcacgttgtgaaccaccgatgatttcaccaattcctggagctaatacgtccattgccgccacagttttttcatcatcatttaaacgcatatagaatgctttaatgtcttttggatagttttttaccacaactggtgatttgaaatattcttccgctaagaaacgttcgtgttcagaagaaagatcgataccccaagaaacagggaattcaaattttttaccagattttaataacacatcaatggcatcggtatagttaatttgcgcaaaatctgagtttacaaagttttctaaacgagtaataacatctttatctacatgtttttcaaagaattgtaagtcgtctttacgctctgctaatactgcacgaaatacgtatttcaacatatcttctgcaagttttgcgttatccgctaaggttgcaaatgcaacttcgggttcaaccatccagaattccgctaagtgacgggtggtattcgagttttctgcacggaatgttgggccaaaagtataaattttgcttaatgcacaagcataggtttcgccgtttaactgacctgaaaccgttaaaaatgattctttaccgaagaaatcttggctgaaatcaacttttccattttcactacgtggaagattttctaaatcaagtgtagaaacacgaaacatttcacccgcaccttcagtgtctgatgccgtaattaatggggttgccacccagtagaaaccttgttcgtggaagaaacggtgaattgcttgagataaacaatggcgaacacgtgcaactgcaccaataatattggtacgagggcgtaagtgagctacttcgcgtaaatattcgatagagtggcgttttgctgccattgggtaagtatctggatcttcaacaaaccctgtcacttccactttttctgcttgtaattcaaccgcttgtccttctgaaggtgattcaacgactttacccgttacaatcacagaacagcctgttgttaaacgtaaaatttcgctttcgtaattttcaatatcgttattaataattgcttgaattggatcaaagcaagaaccgtcataaaccgctaagaaagataagcctgctttagaatcgcgacgggtacgaacccaaccacgcacagtgacgctttcaccaatcgccactttcccttgtaatacatcaacaattgatgccactttagacatattaaacctctgtaactgaatgtaattcacataaaattgccgatagtttaccttaataaaggaaattttccataaaaatatagtgttggtgcgggctatgaacaataaaatagccttaaaaatgagtcctaaataaaatagggtaaagcctcattaatattgaatatacgcgattttatgctaaaatctcgggccaaatcattatggctaataataggaaaaaatatgaaagttttagaaggctcagtcgcagcacctaatgcaaaagttgccgtagcaattgctcgttttaacagttttattaatgaaagtttattagaaggtgcaattgacgcattaaaacgtattggccaagtgaaagatgaaaatatcactatcgtgcgtgccccaggcgcgtatgagttgccattagttgctcgtcgtttagctgaaagtaaaaaatttgatgcgattgtggcattaggtacagttatccgtggtggtacagcgcactttgaatatgtagcaggagaagcaagcagcggtttaggaaaagttgcaatggatgctgaaatccctgtcgcttttggtgtattaaccacagaaaatattgaacaggcgattgaacgtgctggtactaaagcgggtaataaaggtgcagaagcagccttaaccgcacttgaaatggttaatcttattcaacaaattgatgcggcataaatcatgacagaacaaaaacaagtgaaaaagccttctgctcgtcgtcgtgcgcgtgaatgtactgttcaagccttgtattcttgggcagtatccggcaatactgcagaacaagtggaattagcctttgtgttagatcaagatatggaaggggtagataaaccttacttccgtaaattatttcgtcaaacaatagaaaatattgaaaccgttgatttttcaatttcgccttatattgaccgcgcttttgatgagcttgatcctattgaaacggcaattttacgtttggctgtttatgaattgcgctttgaattagatgtgccatataaagtggttatcaatgaagcgattgaagtggcaaaagtattcggtgcagatgaaagccataaatatatcaatggcgtacttgataaaatcgcaccagcattagggcgtaaataatccttttaaactgagaatggcgcgcgtttttaacgcgtgccttttcttttataagataggtggaaaaatggcaatgggtgaatttgatttaattaaacgatattttcagcaacaaatattagttgatgattccgttcaattatctattggcgacgattgtgcgctggtttccgtgccagagaattatcagcttggcattacgaccgatacaatggtagaaaatacgcattttttaccaaccattttacctacggacttggcttataaggcggttgcaacaaatttaagtgatcttgctgcaatgggggcacagccaaaatgggtttcactggcattaactttgccaaatgtagacgaaaattggatttcaacatttagccaaagtttattgcacacgttaaaaaaatacaacgtcacattaattggtggcgatactacaaaaggtaatttgtctattacgattacggcacaaggttttgtcgaaaaaaacaaaggaatttgtcggcataaagcacaaatcggtgatttaatttatgtttcaggcactttaggcgatagcgcagcaggtttaacacaaattttattgggcaaaagtgcggttgattctgatgatgtttttttgcaacaacgacatcttagacccacacctagaattgaacttgggcgggcgttaattgatattgctcacgctgccattgatctttccgatgggctaatatctgatttagggcatattcttgaacgaagtcaatgttgtgctgaagttgaactgactgcattacctctttcatcatcgattttaaataaatatgatcgcactcaagcggaacaatttgccttaagtggtggagaagattatgaactctgttttactataccgcccaaatctaaagatgaattagaattacgcttgaaaaaactgaacgtgccttgtacttgcattggtaaaatcactgaaaagtgcggtgacttttctccccgttttttacgggatggaaaacctgtgaatataactttttcaagcggtttcgatcattttaaggaatcaaaatgacagaaaataatcctcttaaaaaaatctctcttttaaatcctattcatttacttgccgttggttttggctcgggtttaatttatccagcacctggcacgtgggggagcttagctggaacaattttaggcgtgattttgctttctttgttaggtgtaaaaatctttttaattttcaccgcactttgttttctactcggttgctacctttgccaaaaaactactgcagatatgggcgtgcacgatcatggttctatcgtctgggatgaatttgtcggcgtatttattgtattagcagcgataccgtcattatcttggcaatggattttggctgcttttgcgttatttcgctttttcgatattttaaaaccgtttccaattcgttattttgacgaaaaactcgaaaatggttttggcattatgatcgatgacgttttagcggcaatttatgccgtgattgtcgtatttgcaattcagtattggatgttgtgatgctgaatttaatcattgtgcatttatttggattaatgacgccaggccctgatttcttctatgtaagtcggatggcggcaagtaactctcgtcgtaatacagtttgtggcattttaggcataacgcttggtatcgctttttggggaatgctttctatgttgggattagcggtgttgttcgttaccattccagcattacatggcgttattatgttgctaggcggtagttacttagcatatctcggttttttaatggctcgcagcaaaaaatacgctaaatttgaaccgcactctgatactgaatttaatcagcaaaccacaatcaaaaaagaaattttgaaagggcttttagtgaatttatccaatgcaaaagtcgtggtgtattttagtagcgtgatgtcgcttgtcttagtaaatatcactgaaatgtggcaaattatcttggcttttgcagtgattgtggtagaaacattttgttatttttatgtgatttcattgattttttcacgtaatattaccaagcgtttatacagtcaatacagccgttatattgataatatggcaggtattgtatttttattttttggttgtgcgcttgtttataacggcatcaacgaaataattcattaatagaaaaggaagtaacatgacattaaaaattgcaatcgctggtgctggcggaagaatggggcgtcaattaattcaagcggttcattctgcggaaggcgtagaactaggtgcagcttttgaacgcaaaggatcatctttagttgggacggatgcgggagaattggcgggaattggtcatcttggcgttgcagtttcagacgatcttgaaagtcaaaaagataaattcgatttattaatcgattttacccgaccagaaggcacccttgaacatattgcattttgcgtagcgaataataaaaaaatggtgatcggtacaacgggttttgatgaaaatggtaaagcagcgattaaagcagcttcagataaaattgctattgtgtttgcatcaaatttcagtgttggcgtgaatttagtcttcaagcttttagaaaaagcagcaaaagtgatgggggattattgcgatattgaagtgatcgaagcgcatcaccgccataaagttgatgcgccatctggcactgcactttctatgggcgaacatatcgcaaaaaccttaggtcgcgatttaaaaacgcacggagtcttctgccgtgaaggaatcacaggcgaacgtaaacgcgatgaaattggtttttcaactattcgtgcttcggatgtggtgggggaacactcggtttggtttgcagatattggcgaacgtgtagaaatttcccataaagcatcaagccgaatgactttcgctaatggtgcagtgcgtgctggtaaatggttagaaaataaggcgaatggcttatttgatatgaccgatgtattagatttaaataatttataaatcaatttcaatgtcactttctacgtgacagcaacataataaaatctcatcaggttgaataaaggcaaggggcatttctttataagacaccttgccttttttgatcttaacgcgacaagaaccacaatagccactacggcattgatattcgtgatgaatattatttttctcgagatgatcaagtaaacttgtttcattattgaattctaatgtggtgttatggcggataaggtggattttcataataacgatatgttgtaatttgtcgtgctattatataaggaaaagatgaaattattgataaaaacttcacttagtcagtggatttgcttgaattttgccaaaatccctatttttaaaatgctaggttttataaccgcactttttattactgcttgtagttctattagcaaagaaccagtgaagactgtggatatttatattaaaccttattattcggcggaaaatggaaaagcagaaaatgtatttgtacataaagaaattgatcctatgttacgtgaaaatacgttaaaaggttataaaagtgcggtaaaatttgtagaagaaaatccagctcgcatttcaccaatgacaatgtttaccttagccgctcgggcttacgattttggcttaagagatgaagcggttacttggttttatcgtggacaaaatcgtttgattaccgcactttatgtgttggatttaccaaaacaaacggtgcaggataatacagggttcagccatgttgtagggcagtttgttaatgcttatgcgttttgtgattttgataaacaaagtcgtgctgccaaaaatgcggtgaaatggacaattgcgcatccttatgaagtgattttcttaccagcattacccgcaaaatttgcagatcgtcaaaaagcgttaaaagaatcggaagaaaaattagttcaacgtttacaggaacaagcccgtttttttgctaatccaaaaaataaagaaaaatggcaaaaagagcggtcagaaaattttgtgaatgaacgattttgttggtaacaagaaaaaatggaatagcgaatacgttattccatttttatttttgataagccaatgatttttcgcattattcttttactttttaaggacttggtattatcattactcggttttttatttatagagaaaagagaagcaggggaaactatgcaacatctgaacgagcttattgagaaagcgaaattagcgattgaatccattcaggataaaagtttaacggctttggatgaaatccgtgtcgaatattttggtaagaaagggtattttacgcaattaatgaaagaattgcgtaacgtgtcagctgaagaacgtcctgcgatgggtgcaaaaattaacgaagcaaaacaagctgcgttagaatttttaaatgctaaaaaagcagagtgggaacaggctgaacttaacgcaaaattagaaaaagaacgtgtagatgtcagtttaccaggtcgcaaagttgaaactggtggcttacacccagttaccatgacgattaatcgtgtaacaaaatttttctcagaacttggcttttcagttgaaaatggccctgaaattgaaagtgattattacaacttcgatgcgttaaatattcctaaacatcatccagcacgtgccgatcacgatactttttggtttaatccagaattattactccgcactcaaacttctggcgtgcaaattcgtactatggaaaaaatgcagccaccaattcgcattatggcaccaggacgtgtatatcgtaatgactacgatcaaacgcatacgccaatgttccatcaaattgaactactttatgtggataaaaaagcaaatttcaccgaattgaaaggtttattgcacgatttcttacgcgctttctttgaagaagatttacaagtgcgtttccgtccatcttatttcccattcacagagccttcagcggaagtggatgtgatggggaaaaacggtaaatggttagaagtgttaggctgcggtatggtgcatccaaatgtgttgcgtaatgttggtattgatccgaatgaatattctggttttgccgtgggaatgggcgttgagcgtttaacaatgttacgttataacgtaacagatttacgttcgttctttgaaaacgacttacgtttcttaaaacaatttaagtaatttctcggatttgaattaaaaggataacaacaaatgaaatttagtgaacagtgggtaagagaatgggtgaaccctgcggtgtccaccgagcaattatgcgagcaaattaccatgcttggcttagaagtagatggcgtggaaagcgttgcgggtacatttaatggtgtcgttgttggtgaagtagtagaatgtgcacaacatccagatgcagataaattacgtgtaactaaagtgaacgtaggcggtgatcgtttattggatatcgtgtgtggcgcagcaaattgtcgtcaaggcttaaaagtggcttgcgcaacagaaggtgcggtattacctggcgatttcaaaattaagaaaacgaaattacgtggtcagccatcagaagggatgctttgttcattttctgaattaggtattgatgttgaagcggatggtattattgaattgccacttgatgcaccaattggtactgatttacgtgaatatttagctttagatgataatgccatcgaaattagcttaacgccaaaccgtgcggattgtttgagcatctcaggtattgcgcgtgaaattggtgtggtaaataaacaactcgtaaatcaaccgcactttgaagcagtgccagcaacaatttctgataaagttcaaattgatttacaagcaccagaagcttgcccgcgttatttattacgtgtgataaagaacgtcaatgtaaaagcaccatcgccaatgtggatgcaagaaaaattgcgtcgctgtggtattcgttctatcgatcctattgtcgatattactaactatattttgcttgagcttggtcagccaatgcacgcgtttgatgtagctaaagttacacaacctgttcaagttcgtttcgcgaaagagggagaggaattagtattattagatggctcaatcgcaaaacttcaatcaaatacgttattaattgctgaccaaaatggtgctttagcaatggcagggatctttggtggtgcagccagtggcgtgaatagtgaaacgaaagatgtgattttagaatccgcatttttcgctccattagcgattgcaggccgtgcaagacaatatggtttacatactgatgcatcgcaccgttttgaacgtggtgtggattttgaattagcacgtaaagcaatggaacgagcaaccgcattattacttgaaatctgtggtggtgaagcgggtgagatttgtgaagcaagcagtgaaactcatcttcctaaagtcaatacagttcaacttcgccgtagtaaattagatgcacttttaggtcatcatattgaaacagaaagcgtaacagaaattttccatcgtcttggtttcgatgttacttatgcaaatgatatttggacggtaacttctgcaagctggcgttttgatattgaaatcgaagaagatttaattgaagaagtggcgcgtatttatggttataacagcattccaaacaatgcaccattagcgcatctccgcatgcgtgagcacaaagaatctgatttagatttagctcgaattaagaccgcacttgtggatgcagattatcaagaagctattacttatagctttgtggatccaaaaattcaaagtttattacatccacatcaagaagcacttgtattgccaaacccaatttctgtggaaatgtccgcaatgcgtgtgtctttaatgagtggtttattaggtgctgtactttataaccaaaatcgccaacaatctcgtgttcgtttatttgaaacaggattacgttttgtgccagatgctaatgctgaatttggcgtgcgtcaagaatttgttttaagtgcggtaattactggagcggcaaaatctgaacattgggcaggtaaagcagaatctgtagatttctttgatcttaaaggcgatttagaatcagcactttctttaacagaaggtggtaatagagttcgttttgttgcaaaacaatttgatgcattacatcctggccaatctgctgctattgaattagatggtcaagaaattggttttattggtgcaattcatccatctattagccaaaaacttggcttaaatggcaaaacttttgtatttgaaattctttggaatgcaattgcggcacgtaatgtggtgcaagcaaaagaaatttctaaattcccagcaaaccgtcgtgatttagctttagtcgtcgcggatagcgtaccagcaggggaattaatcgcagcatgtaaacaagcaggtggcgaaaaattggtgcaagtgaacttgttcgatgtatatcaaggtgtgggcgttgctgaaggctataagagtttagcgattagcttaactgtccaagataatgaaaaaacacttgaagatgaagaaattaatgcagtgatttcagtagtattagcggaggtaaaacaacgctttaatgctgaattaagggattaatatggctacgataactaaacttgatattattgaatatttaagcgataaatatcacttatctaaacaagatacgaaaaatgtagtggagaactttttagaagagattcgttcatcgctagaatctggtcaagatgtgaaattatcaggatttggtaattttgaattacgcgataagtcatctcgcccagggcgtaacccaaaaacaggtgatgttgtgccagtttctgctcgccgagtagtgacatttaaacctgggcaaaagttacgtgcccgtgtagaaaaaactaaatagtaagcaacaaaaagtgcggtgaatttctaccgcacttttcatatgaaaaggtatgaaagtatataaatcatttttaatcgctactgcctcgctgtttttattcgcttgttccagttttcaaaacgatgattatgcgatgaactataaaggtcaaatcggcgatcctattatggccatagccatgttgagcgaacaacaacatgaatgggcaggtacaccttatgtgctcggcggcgtttctcgtcgtggggtagattgttctggttttgtgcagaaaactttcttcgatcgttttaatcttcgtttgcctagaagcactgttgaacaagctaattatggtaaacatgtacgcaaagaagatattcaaactggcgatttaattttctttaaaactggccgaggccctaatggttatcatgtgggaatttatgtaaaagaagataaattccttcatgcttccaccagagggggagtcgtctattcttcaatgaataacccttattggtcgaaagccttctggcaagtcagacggatttagaaaatataatgctggaattttccagcattttttataatgatttttttcaaatttgggagataaaatgtcctcaaacttaaccgcacttcaaattcaacttgaaattttacgccttattccaaaaactcgttttattaccgcagaagaaatcttacaaaaacttgctgatattggcgttcaacgtgatattcgttcagtccaacgccagctagaaagtttgtctcaacagtttgaaattgagcgagatatgcgtgataaaccttatggatatcgatggaaatcaaatgctaaaggcttggatttaccgattttaaatgaacagcaatcacttgtgcttatgcttgctaaacaatatctcaatggcattttgccttctagcattatgaactcaatggaggcgttctttcaacaggccgaatataatttggtttatgacagccataaaaaatcaggggcagaatggcttaataaagttgctattgccccaactagtcagccgttattacctgccaaaatcaatccagaaattttttctcaaattagtaccgcactttatcaaaatcgatttttacaggtgcattatcggagtattcacggtaaagaacataaggcacaggtcaagccattggctttggttcaacaaggaccaagtagctatttagtcgcacaatatgagaatggcgatattttacaccttgctttgcatcgcttgcttaaggtaacagtgagtacaatgatatttgaacgccctgattttaatttgaaatcttatgtagaaagccaaaagtttggttttacctatggtcgaaaaattcgattaactttccgcattaataaagatattggtggatttttaacagaaacaccattatcaatggatcaaacagtaaaagattgtggcactgaatatgaaatttccgctaccgtgattaagagcgctatgctggaatggtggattgcccattttggtgaagattaccaagaaattgaccgcacttatttagacgaaaatgcctaacgacataaattgtcgcttcatcttttatcattaagccatcaacagagagggcattaaaatgaagaaaattgtttatattgatatggataatgtgatggttgattttccgtctggtattgcaaaattagatgagaaaaccaagcaagagtacgaaggtcgatatgatgaagtagagggcatttttagcttaatggaaccaatgccaaacgcgatttctgcggtgcataaattgatgaaaaaatatcatatttatgtgctttctactgcgccttggcataatccatccgcttggagtgataaagtaaaatggattcaacattatttcggtgaagaaaaaggttcagtcttatacaaacgattgattttatcccatcataaaaatctcaaccaaggtgattatttaattgatgatcgcactaaaaatggagctggtaaatttcaaggcgaacatgttcattttggtacagaacagtttgctaataaaaggagcctgaaaaatgacagagaaaaataaaccaatttgcgtggtattaacgggagctggaattagtgccgaaagtggtattcctacttttagagctgaagatggattgtgggcagggcataaagtagaagaagtttgcacgcccgaagccttgcaaaagaaccgtgcgaaagtgcttgatttctataaccaacgccgtaaaaatgcggcagcagctaagccaaacgctgcgcatctcgccttagttgaactagaaaaagcctatgatgtgagaatcatcacgcaaaatgtggatgatttacatgaacgtgccggcagctcgaaggtgttgcatttacacggtgaattaaataaagctcgcagtagctttgatgaaagttatattgtggattgttttggtgatcagaaattagaagataaagatccaaatggacacccaatgcgcccttacatcgtcttttttggtgaaatggtgccgatgttagaacgagcggttgatattgtggaacaagcagatgttgtgttagtgattggcacttctttacaagtgtatccagccaatggcttagtcaatgaagccccaagaaaagcgccaatttatttgattgatcctaacccaaatacaggctttgttcgtaagcaagttattgcaataaaagaaaaagcaggcgagggtgtgccgaaagtggtggcagagttattagagaacaccaaaaactcatagaaaaatgaccgcacttttcacataaatagcgagttttatatcactatactgtatgactgatgaattaacgagaaacgtatgcatccagtaattgaattttatttagaacaaagaaaaagccaacataatttatctttgcaagatatgtgggcaatgccaaaaagaatgattggcgatgcttatttttatattccttggcttttacctgttactgaaagttccaaatggaatcgttcagtaccggtttttaacgaagaagacctggctatttttattggagatgaagcaattcaaaataaatatttacattctattgatattattctggattacttctgtttatatcgtgaagataataaaatattcccaaaaacagaattgagtgaacgtaaagtttggctacgtaatatcgggcatgaaagtaagaagatttcccgcatcattcgtagtttaaattattgcggtcatactgagttggctaaaagtttacagcaactggcaataaaattaggtcaagaaaaaggcgtaattcaagaagaaaccatagggatttggacaaatctacttaaataatgaggataaaataatggtaacagaagagtttaaaaaagtagcggtatcttttgctggtggagatggcggaaaccctaaatcagaagtgtggttttgtgggttagaatgggggattggtgatgaagcttctcctgatgatttttataagaaatttagtttaagccctaaattaatagcgcactcttggttagaggacgattttgatggtagttggactacacaatataatcaaaaattatgttggtttttgtggtactactataatttagattggaaaagtggtgaaagctatgagtattttgttagtacttataatgtgctttatccacagggtattggttttaaattaaatatgctaccaataaatttcaaaaatagagcatcaattcaatggaatgaacaattcattaagatgacaggatttgaaacattcgatgaatatagagaatggtgtgttgaaaatcgtggtgctttttatcgtcaacttatagatgaatgtaatcctaaagttattatttgtacgggagtcactgaaaaagataacttctttaagttttttactggagaagccgtatatgaaaataaagcgttgaaagaatttaatatcttctatcgcaagtacaatgatactttaatttgtgtttgcccattttttggtggcccaagtggcattaattcttacgacaaaatggaagcattagtagagccagtaaaagaattatgtaaataatttttttattaagtttaacgttgatagataaatagcgacttcggtcgctatttatcattacttctcttgcttatgtttaagcatatgcataataagcctaataatcgtttctttttgtttcggatcagattctgcaactaacaaagtaagtgctgcaaggccagtatcattgataactgggtatccattatgatcaaacaaacgcccatttctatgtaagaaatctacaaataaaaatgcgccgctacgtttattaccatctgaaaaaggatgattcttgacgacaaaataaagtaaatgcgccgcttttgcttcaatgcttggataagcaggttcaccaaatacactttgatctaaattacctagaatcgcagataagccgttatctcgttcacgtccaaagagatcacttgcttcaccttttgccatcagctgtgattttaactctgctagtgcagaacaagcctcagcataagtcggtaatgtaccgccttgctgtgtttgtggttcggcaagtaaaccttcatcatattgttgtagccataaaaacgtatgcgtataacggctgacaatatccactaatccgcgaccgctttctagcgttaattccgatgaatttgccgttttttgaataagcgcaagtgcttgttctaattcgtgagcattttgctgtaaacgtttttggttaatggtatagccttgagtcagatattcttttaaacgtgcagttgcccaacggcggaaactaatgccttgtttagattttactctatagccaacagagataatcatatctaaatcataatgctcaatttcacgattgacttggcgtttaccttcttggcgaactatccggaatttccggataattgattctttctcaagttcttcgtcatcaaatatattggtaatgtgctcattgatggtgcgaatatctttaccaaataacatagccatctgcgcttgggaaagccaaacggtgtcattttcaaatctcacttccacttgcgttgtgccatcttgagcttggtaaatttcaatcgggttttggttattcatattattttccttaataagttacatgtatatataaacagataattatgcatcttgcaatacagataatcttatttgcaaaaaatcttctaaaaataaccgctttcaacattcgcaaacgacacaagttgtcgcttcctttcatataatttctccataaagagaaattctttacttcttacatatttataaagcctttaattaagaaaaaggagcaaataatggcaatgaaagtaattatggcaagagatccactttttgaagatgtaaaaaaatttgtgcaacaacaaaaatttgtctcttgttcaatgattcagcgcagatttatgttgggttttaatcgagctggacaaattttagaacagttggaacaagcgggtattatttcatcaatgaaaaatgggcagagaaaagtattatgaaaaatgacttaaattatgcagtagaacttatccgcaaggcagacggcattttaattactgctggagcaggaatgagcgtggattctgggctacccgatttccgcagcgttggtggattttggaatgcttatcctatgtttaaagaacataatatatcttttgaagacatcgcgacgccactagcttataagcataatcaggaacttgcctattggttttatgggcatcgattagttcaataccgaaatactattcctcacgaagggtatcagattttaaaacgttgggcgggagctaaatctcacggatatttcgtttttaccagtaatgtggatgggcattttcaaaaggctggttttgatgatagccatgtttatgaagtacacggtactttggcgcgtcttcagtgtgtcaataattgtcgaggattaagttggtctgcatcaagttttcaacccgtcgtggataatgaaaacttatgtttaaccagtgaaaaaccacattgtccttattgtgggggctttgctcgtcaaaatgtactaatgtttaacgattggagttatgcaagtcaatatcaggattttaaaaaagtgcggttagaatcgtggttaaaagaagtgcaaaatctcgtcgtcatcgaactgggtgccgggaaagccattccaactgtacgtcgattttctgaacgtacggcgaaagcaaaaaagggtggatttatccgtattaacccacaagatgcaggcgtgccgaaaatgcattttttaagtctcgaaatgaaggcgttagatgccctaaaggcgattgattgtcttctaaatccttctcaacaagcggttgaataatggaaaatttttgcgaaattaccttctgccaacaaattggcagtaacaagcgacacaaccaagatgccctttttaatggcgaggcggtgtttcaatataaactcaaaacagctgaaaaacgccttgaaaaccgaccgcactttattgtgggcgtggcggatggtatttccaatagcaaccgacctgaaaaagcgagcaagttggcaatgcaattattaagccaaatggaaagcataagtcgtcaaacgatctacgatttacaatccagtttatctgaagaattagcggaggattatttcggctcagcaaccacttttgtggcggctgagattgatcaaataacctgtaaagcgaaaattctcagtgtgggcgacagtcgtgcttatttaattgattcccaaggaaaatggcaacaaatctcccaagatcattctattctttctgaattattggctgattttcccgataaaaaagaggaagattttgccactatttatggtggcgtttcttcttgtttagtcgcggattattctgaatttcaagataaaatcttttatcaagaaattgaaattcagcaaggggaaagtttattactgtgttctgatggattaacagatggactttcagaagaaatgagagaaaaaatttggaaacaatatgataatgataaatcaagattgacggtgtgtcgtaaattaattgtgaaacaaatagcttatgatgatttgtcggttataatatacacactgcttaagaaattttagcagtagatattataatttttcttatttttaaatttagtctacctatttaacctaaggaggtaatatgactagccaggattatgcaatcaaaggtgaagcattcaaactaagtaaggtatttagttcagattttcaatatttaattccaaactatcaacggccatattcttgggaggttgaaaatatcgagcaattatttgatgatttatatgatttttttcagggagataccgaagagacatattttttaggcagtgttgttgtgataaaaaaagatcattttccagaatcatatgtggttgatggtcaacagcgtttaactagtctaacaattttattatcagtcttagctagcctcttaagtgataaatcaaaagctaatagtatagagttatatataaaacaaccagaaaatctagctgaaagtattcctgctcagccaaggttaactttacgtaagcaagataatgacttctttagtaaatatattcagaatataaaaattgaagaattgaaaagtattaatattgattctgattgtaaaacggatgcgcagaaaaatatttataagaatacattagctctagtaaaaagagttaaagataaatttgaaggggatgaagaaggtatctttgagttttgtaaatttatcattcaaaaatgttgtattgttatcgtttcgactccaaatgaaaaatctgcatttcgtattttctcagttatgaatgatagaggattagatctattacctagtgatattttgaaatcttatttaataggaaaaatgagtagtaagcaagatgaatatacagataaatgggaagatttagaacaagatttaggtcgagctagattcaatgagctattttctcacattagaatgatttatctaaaaacaaaagcacaaaagagcttattggatgaatttcaagaaagtattattcctaatattaatagtgtaagtgattttatagatactgagcttacaagttatgcagataagtttaatgcattaaaatctagaaattatagagcaggaaattttactgaagagataaatggatatctattttggttaaataaagttaatttctctgagtggattccggtggttattagatttttgtatgctaagcctacagaacaacttgcttatgatttttttaaacatctagattgtttaacttcttatatttatttaagtgctaaaaatataaatgataggatttatcgttttggagatatattgaaacagttagagaatgatttaaattgttctaaagaattaaagattccgaataaattgtatttaacagatgaggaaaaacaagagtttaaattattacttgatgggaatgtttatcaattagtatcacctagacgaaattatttaattttacgaatggattcaatgatcagtgatggcgctgcgacatataatctacagaaagattctttgacaattgaacatgtattaccccaaacaattgaagatggtagtcaatggagttcttggtgggatgtggataaccataaattatgggtacaccgtctagctaatttagtgcctctaaatagaagacgtaattcttcagcaagtaatttggagtttaaggataaaaaagagaaatattttaaaggaaataataatgtttcatcttatgctttaactacacaagttttggatactgaagaatggactcctgatattgttgctcaaagacagggtaatttattatctagactttataaagaatgggaattaatttaagttataatgcctaacgacacaatccgtcgctctacttcttaaactatgctcaagcctattaggtttgagcattttttattggagtgatgattatgtctaaattcaaacttaacccaccatcagtttctctttataccgaaaaattaatgttgcaacttttattagaatatcgaggattttcagaggtttttcgtgagaataattggcgatatgacaatattgcggaagccttaggtttaccgagtgaaatggagaatagcgatgatttttgtgcgaaagtaaaaaaattattacaagggcgaaataaaacgttgccaaaattgaccgctctttgcgtaaacgagaatccaattattcaacaaaatattgatacgctgacccaattattatcattgaatgctgctgagcagacgcttttccgtttatcggttcagctacgcttagatgagccattaaaagaattgactggggtattaccaaaatctaatttggtaggggttagtgaggtattatcaaatttatttggtttgccaaaatcagacattatttcagccttaaaagacaagggaaaactattgggttatggcttgcttgaacgaaactataatccagatagactctatgactatttggagtggggcaaaatgttagattttgatgaatttatctcagaaccattaaatgaacaaatgttattaaaagtctgtacaaaaccagctattgagcctagtttgagtttagacgattttgcttatttaaacgagatgaaaacaatgatggtggattatcttcagtcctcatttgctactcatagaaagggtgtaaatattttaatttatggtgccccaggtacaggaaaaacagaatttgcaacgttattagcaaaagcagtgaatgtttcggcgcataatattacttatatggatgaaaatgaagaagtaatacgagcggaagaacgtttgaataagtgccgttttgcgcaaaaggtattagaagggcagtcttcgttattgatttttgatgaaatagaagatgttttttacgctagtctctttggccattctgtggcgcagaaaaataaagcttggatgaatcagttattggaaaacaataacgtgccgataatttggttatctaattctgtttcgggcatagatcctgcttttttacgtcgctttgattttattttagaaatgccggatttaccgttgaaaaataagtcggcacttattacgcaactgactgagggaaaattaagtccggcttatgtgcagcattttgctaaagtgcggtcattaacgcctgcgattttaagccgcacaattcgggtggcaaaggaactcaatacgtcaaattttgcggagacgttgctcatgatgtttaatcaaatattaaaatcgcaaaataaaccaaaaatcgaaccgcttgttttaggcaaagccgactataacttagattatgtggcttgtaacgacaatattcaccgtattagtgaagggttaaaacggtcgaaaaaaggacggatttgttgctatggtccgccgggaacaggaaaaactgcttgggcagcatggcttgctgaacagttggatatgccattgttgttaaaacaaggctcagatttgcttaattgttatgtgggcaggacagaacaaaatattgctcaagcctttgaacaagcgaaagctgataatgcgttattggtgttagatgaagtggatacgttcttattttctcgagaaggggcaaatcgaagctgggagcgttcacaagtgaatgaaatgttgacacaaattgaacgctttgaagggctgatggtggtatcaacaaatttaattgaggtgcttgatccagcagccttacgtcgttttgatttaaaattgaagtttgattatttaactcttaaacaacgcttggattttgctaaacaacaggctgaaatcttagggttgccatcattatcggaagaggatttaagtcagattgaatcgcttaatttgctgacgccaggcgattttgctgcggtggctcgtcgtcaccaattttccccttttcaaaaggtgcaagattggctgatggcactacaaggggaatgtgaagtgaaaccagcgttttctgcaacggcaaggcggataggattctaaacagccatacaacattccgatgattatcaaagatccaaactctaatcgtgtaaatcaagaagatgataaccttgtttatcttcacgatttaacttcaacagtgttcgatttagccaatcaaaaagtgccagaaagttttgaagggcagagcgttcttccaattatgcgccaacaccaagataaccaaagaaaaggtgtgcttggtcagcttgcggggcattttgtgtattttgaacagcgtatgtggcgtcgtaaagattacaaactcgtatttaatgcgactgatgtttgcgaactttacaacatccgtaacgatccagaagaaatgcacaatttattctacgatccacaatacaacagcatcaaaaaagagatgttggaagaaatgcgtgcagagatgaaacgtctgaatgacccactggaaaattgggtttatcgaattattgacgaaatttaatcaaagtcgtagattaagggcgtatctgatacgccctttgttatctctgcaccttatttatcttttaaaaccataggaataaacatgaaaacaacattactaaaaacactgacaccagagcttcaccttgttcaacataacgacatcccagttcttcatttaaaacatgcggttggaacagcaaaaatttccctgcaaggggcacagcttatcagttggaaaccgcaaaatgcgaagcaagatgtattatggttaagtgaagtagaacctttcgaaaatggcaatgctattcgtggtggcgtaccaatttgctatccttggtttggtggagtaaaacaacctgcacacggtacagctcgtattcgcttatggcagttaagccattacgatatttcagcgcataaagtgcggttagaatttgagttgttttctgatttaaatattatcgaagctaaaattgtaatggtatttacagataaatgtcatttaacttttacccattatggagaacctgcgcaagcagcattacatacctattttaatattggggatattaatcaagtggaagtacaaggtttacctgaaacttgttttaatagcttaaaccaacaacaagaaaatgttccgtcaccgcgtcacatttctgaaaatgttgattgcatttattctgcagaaaacatgcagaatcaaatcctagataaaagtttcaatcgtacaattgcactgcatcatcataatgcaagccaatttgttctttggaatccttggcacaaaaagacgagtggaatgagtgaaactggctatcaaacgatgttgtgcttagaaactgcacgtatccatcacttgcttgaatttggcgaaagtttaagcgtagaaatttcgcttaaaggctaaattttgttgcataagtggtgtgaatactatagaattcgcgagattttgctcgttccttgcgggcaacaaatttgaaatcttttatttttagcgaaaagatttttactattaaccaatagaaggaatacgattattaaaaccgtaaaaaaagcaccggcagtaaatcgcccaaaccgtatcaatgaagagattcgtgtaaaagaagttcgtttaattgaccaaaatggtgaacaggcagggattgtttctattcaacaagccctagaaatggcagagcaagcagagcttgatcttgttgaaattagcccaaatgcagagccgccggtttgtcgcattatgaactacggtaaattcctttacgaaaaaagtaaaaccgctaaagaacaaaagaaaaaacaaaaagttgtgcaagttaaggaaattaaattccgcccaggcacagacgaaggtgactatcaagttaaattacgcagcttaatccgtttcttagaagacggtgacaaagcgaaaattaccgtgcgtttccgtggtcgtgaaatggctcatcaagacatcggtttagatgtgttagagcgcgtaaaaaatgatttagctgaaatttcagtggttgaatctgcaccaggtaaattagaaggccgtcaggctgtaatggtgttagcaccgaagaaaaaataagaattttgctgagatttttcagcaaatctttttgtttaagtttgacttaaatgaaaagacaactgcatgttgggcacactacgcagcctaactgcttttgaaaaggtaatttaatttgccttatgatggaaatgatcagtgcttccaagtaactttttaagttcgcctgattatgttgttttaaacgaaaaatgcggagttattttaacaatgcctaaaatcaaaacagtacgcggcgcagcgaagcgcttcaaaaaaactgcttctggtggtttcaagcgtaaacaatctcacttacgtcatattttgactaaaaaaacaactaaacgtaaacgtcatttacgtcataaatcaatggttgcgaaagcagaccaagttttagtagtagcttgcttaccatacgcataagccgttatttaagcaaaacgtacgattagttcattttagaaaaatattacataggagattaaataatggctcgtgtaaaacgtggtgttattgcaagagcacgccataagaaagttcttaaggctgctaaaggttattatggtgcacgttcacgcgtgtatcgcgttgctttccaagcggtgatcaaagctggtcaatacgcatatcgtgaccgtcgtcagcgtaaacgtcaattccgtcaattatggattgcacgtatcaacgctgcagcgcgtcaaaatggtttatcttatagcaaatttatcaacggcttgaaaaaagcatctgttgaaatcgaccgtaagattcttgctgatatcgctgtattcgacaaagtagcgtttgctgcattagttgaaaaagcaaaatctgcactttaattttttaaagtttagataaagaagaattaggacgctgaaaagcgtcctttttttgcacttatgactttaaattttgtaaaataatgccattagttctcatctgttaaaatctatggccgaaacaatcccactgaatcccatcacactgcctttaaatcaaattagcttaatcgaagcatctgctggtacgggaaaaacatatactattggttctttatatctccgacttttattaaaggctggagaaaataacttttctcgtccattaaatgtggaagaaattctggtggtaacatttacggaaatggcaacagaagaactcaagaaaaaaattcgtgagcgtataacagatgcgattaataaactcactgcctttgctaaaacccaagataaatccgcatttaaaaatgatgaatttcttaccgcactttgtcatgatttagatatttttgaggcaattcatcgcttaaagttagctgaacaaaatatggatttggcggcgatttataccattcacggtttttgtcgccgtatgttgatgcaatatgctttccattctggcattcatttcaatttagaattaataaaagatcaatctgatttgttagttcgttttgctaatgaattttggcgagaacatttttatccgttagattttgaatctgcgaattttatcgcgacagaattagtatcaccagcaaatgtgttgtctttgttgaaagcggatttaggtaaagatttgcaggtggagattgaaaataaacaggcgttatctgtaccaatacaaatctttttaccgaaatatcttggtggttatcaaaaggcgttgaatgaattaaaggcattttggttagaaagtgcggatgaaatttcagcgattattacaaatgagctggttaaagattatccaaaagatcagttgaaatcgttaaatcgtaaaaagtaccaagtaaagcgtttaggggattggattaataaaatcaatcaatggtcaaataatcctagagattatcaaattaataccacattgaaagactatttcctacaatcatctattgagaaaaattgcgaagaatcaacggataaaaataaagataaaaaaaccgcaacgcctttttattccccgatttttgcagagcttgaaaagcgcgttaatgccttaatgacaccagatttactcagcaaactcactctttatcattatcgccaaggtctacaacaaaaacttttagactataaatttaatcatcaagaaaaatcctttgatgatttattgcgtttgctttgcgaagccttgcaaggtgcgcaaggagatgaattagcggaaatgattcgtttccaatatccttttgcgatgattgatgaatttcaggatacggattcacaacaatacgctattttttcaaaaatttatcgtgataatcccgaaaaaaatactggttttattatgattggtgatccgaagcaggcgatttatcgtttccgtggcgcagatatttttacttatctaaaagcatcggatgaagcccaatctcgctttgaactcactaaaaattatcgttcagagaagaatctggttgatggcgtaaatgcgttgtttgattttcctcaatcgccatttatttatcaaaatattaactttactgctgttgattctcgtgatgatcatctgcgattttatttaaatggcaaagccgaaccagcttatcgtttttatctaactgaaagtgacaaagtgaataaaactgaaatggcaaaaatatgtgctatttctattcaacattggctaaaaagtgcggtagaaaatcaggcagtttttcaaaatgaagatacttgtaaaacattgcaagcggcgaatattgccgtattggtgcgtgataaaaatgaagcggctttagtaaaaaatgaattgcaaaaattgggaatcgcgtcggtttatctttctgatcaaaatagcgtatttgatagcaatgttgcgaaagaattagcttgggtgcttaaagcctgtttgaatgtggcagaacgtccaattttgaacgcgattgcgaccgcactttttggcttaaatgcagcggatattcatcaaattcagcaaaatgaagcagattggcaacgttgggcagatagctttgctcaataccaacaaacttggcaacgccaaggaatattggcaatgttatatcaaattttattggagcaaggcatttcagagcgattattaagccaagccacgggcgagcgagatttaacggatttcctacatttggcagaaattttacaacaagctgccacgctacacgaaagtgaagcggcattgctcagttggtttgaaaaacaaattcaaggcgaaggtcgtcaagaggctcaaattcgtttagaaagtgaacgccagttggtaaaaatagtgacaatccataaatctaaaggcttagaatatgatttagtttggctaccatttttagctgtgccgagtaaagatccaagtaaaaaagacatcaatatttattattctaaagaacgagatgaaaccttatgggatatggaaaatcgcaatttgaacgctctttgtgaagaaacgtttgcggaagagttacgtttactttatgtggctttaacgcgtgccaaatatcaaatggcattcgctttgcctgcgcaatttgataaaaaatggaatgccttgcattatgtactaagccaaggtgaaataggcaaagaaataaatttgtcagagtctaaagatactgagacgttgttacaaacctttaaagaaaaaatgcgagataatgtggaaatctgtactaagccaaatctagaggcttttccgaccttatcaattaatacaaaaaatgatgatcttaaagccgcagaatttacgggcaatattgagcaagattggcgaataaccagttttacttcaattgaacaagcgcatcgccgacaaaattatttcactgaaagtgcgggtaaaaaacacgctgtttttgatgacgcaaaagattacgatagtcaaaatgctattgaaatgtccaccgcacttttaaacgaaaatgaatcaaatattttagatttaccacgaggtaaacaagtcgggactgcattgcatcgccattttgaaaattgctatttttctgatttagcaaatacagaagaaattgagaaattaagacaatccttacagttagatgaaacctttacagagccgctacaaaattggctacaacagatttcacatacgccactttctcatgaaataggaatagcattagctgatttggcaaataaagattgcattaaagaaatgccattttatttggctattcgggaacattttgatgttgaagcgtttaatcacacgttgaaagcccatcatcatttaccaagtgagccacttcaatttgagcaaattcaaggcatggtgagaggttcgattgacttagttttccgccataatgggaaatattgtcttgttgattataaatctaatttcttaggttcaactcttgctgattacaatcaagaggcattgaaaaaagaaatgttacacagtcactatgattggcaatatttaatttatacgctggcattacatcgttatttgcaaagtgttgtgcctcattacgattatgtgcgagatttcggtggggtattttatcttttcttacgtggaatgaatggtgagccacaatctggcgtattttacgatcatccaagcgttgaattaatcacagaattagacggggtgttttaatgttatctgtattacacaaacttaaagagcggggcattctttctcaaggtaattattactttgctaagttgatagctgataaacaatgtcatacggattatgcggaaccaatcaaaaatttagctatattattagctgcactttgtagttggcgttatacgcagggaaatacttgcagccaattagatcgctatttagaacataatttatttggcttggcttatcgtacaacggaagtagattatttagctgaaattcatgaaaagattggttatttacccgttgaagattggcaaaatgcgttgcgcgggcatatggcatttacgcaagatcccgtcaatcaaattgcgccaatggcatttcaatttggcgcgttgtatttctatcgcgcttggcaagatgaatatcgcatcgtgcaatatataaaaaataccttaaaaaaataccgcactttagccttttcttatgatgaaattcatcaaaaattagagaaatatttccctgaaaaacaggaaaaaacagattggcaaaaagtggcagtggcgatagcgattaaaagtccattttcgattattacaggcggcccaggaacaggaaaaaccacgacagttacgcgtttattgctcgttctacaagaattatttgattgtaaattacacatcaaattggttgcgccgactggcaaagccgcctctcgtttggaagagtcgattaaaaatgcgttaggttttatgcaagaaaaaatgaatgtatccaattcacttttcaatgcgattccacaaaaagccagcaccttgcatagtttactgggcgtgaatgcctttaatgattacacgcgctataacagtcataatcctttgcaattagatgtgttagttgttgatgaaacatcaatgattgatttgccgatgatggcaaaacttatcaatgcgttaaagcccgaaactcgattaattttattaggcgatcaggctcaattagcctctgttgaggcgggggcagtattgggagaattatctcaatttgttaatcaaccttatagtcatgaacaagccacgtatttacaagcgacaacaggctacaaagtagaaggttccgattgttcaaatccaatacgtgattgcttatgccatctaacagaaagtcgccgttttgataaagattcaggtattggcaagttggctgaattcattcaaaaaggcaaagcagacgatggccttgagttatttgaacattatccgcaagaattgcactttaatgccttaaatgatgaaggcgatgcggtcaatcaagtggtgaaaagtgcggtggaaaattaccgcactttcttaaaaatgttggacgatttacgtaaacaaaaaattgatcctaacgctaaaaatgaacaaggcatttcctatgccgaagctattcaagcacaatttaattctgtgaggtttttaaccgcacttcgtaatagcgatttaggtgttgaaaatctcaataaagaaatcgcgttagcgttgcgagcggaaaaattgctttggttccgtaatgaacaagattggtatatcggcaagccaattatgattactgaaaacgattataacgttcgcctttataacggcgatattggcctgtgcttggcaaatggcaaagtatggtttggcaatcgagaagtgctgacaagccgaattccagcgcacgaacccgcttttatgatgacgattcataaatctcaaggttcagaatttaaacataccgtcatggtgcttccaacagaagtaaatccagtactgtcgcgagaattagttttcacgggcgtgactcgtgcgaaaaaagaactcacagtatttgccgatgaaaaaatatggaaaacagcgattcgccaggccgtcaaacgccagagcggattgggaaaattattggaagatttaaattagtaaaaggcggtaaatttggaagataaatcaatcagataatctccatttaaaataacttttggggaagattattttaataaattcttcaaactggttttcattgctgccatttgattttcaaattgtgccttgctttctctttcgtcaatcatataggtaattgtttccgaaagcgtcatcttcatttttcgagaatatttagaaagacgtagccaaaccgcatattccaaatcaatagattttttcttggtatgttgtttttctccattaaaaaagcgtttacggcgtgcacgaatagcttgatcaagcttaattggtaaggctggagaaagatgatttttaatccattcttcaattttttcaggataattttgggattctaataattcttgggctttagcttcttgcaaactacgttcttcgtagcgagtaatattttccccttcgcgatgtttacgaattaggtaaatccatttccaatttgcttcttgattttcgagtttttggtatttcattttttatcattgagtgacgtggtaactgcattaatatacgtgtttttatgccgattttctagtggattttcacaaggctattaaatatgcgataatgtggtcaatttttctagaaagagaccagccgtgagttcattattttctcaacaacaagctattgagcaatctttaaattggcaggcattacaacctgatttggtaattcaagattttcctttagaaccagtggatttctgggcgttacaaccgaatgctacacagggtatcgatttatttttacgtcatccgacacgttccttactaatgatgaaagtgggcgaacctgttgaatatgcggagttattacaaaattttatatcgcaaaatcatcataaagtgcggtcaatttttggtgtaaattatgtgatagagcagggcgactctttttcttttcctcatgtttatactgagccagcaaaatctttagatgataattttgctagtcaaggggaggcgttaagtgcattgtattgcgatcaattccagcttttcggtagttttcggattcatccaagttcacaagatattcaattagtgccgggattggtgcataaggctaatggtggcgttttgattttaagtgcggcaacattgttatctcaatttgatttatgggggcgattaaaacaaattctgcaaacccagacttttgactggtattcagcccatccatttaaaaatttaccttgtgatataccaagctatgcgctgaacttaaaagtgattgtacttggtaatcgtactgaattagccactttggctgagttagaagaaaatctttattctttcgccgattatgctgaaattgaaagttatatttctgtagctgaagtggaggaacaaaaaacttgggcgggttatgtacaacaaatggctcaagagcaaaatattgagctagattttcttgctttaaataaactctatcaattattagttcgtgaaagtgaaaatcgctttttaattaatgcatctcctctcaaattaaaagaaatattacaggatgcttcaacttttgctgaaaaaactgcattaagtgcggtggattttgagggtatttttcaacaaaaattagcgcaatatggtttcttaaaagaacaaacttatgccgatattttaaatgagcaagtttatgtcgaaacgcaaggcgaaattgttggacaaattaatgggctttcggtaattgaatatcctggtacgccagtatgtttcggcgaaccttcgcgtattagttgtattgtgcaatttggcgatggggaagtgattgatgttgaaagaaaaaatgaactagcgggaaatattcacggtaaaggaatgatgattgcgcaggcttgtctttccaatatcttagatttgccctcgcaattgccattttctgcatcattggtgtttgaacagtcttatggagaaattgatggcgatagtgcatctttggcgattttttgtgtgttagcaagtgctttagccgatttgcctttgcctcaacatatcgcaattacaggatcaattgatcaatttggacttgttcattctgtgggtggtgtaaatgataaaattgaaggcttttttactatttgccaacgtcgtggtttgactggaaaacaaggtgtaatcattccaatgacaacaatccagcaactgagtttatctgatgacgtgaaaagtgcggtaaaaaatggcgagttttttatttatcctgtggaagatatttatcaggcttgtgaattgttatttgggcgtgatttgttagatgaaaacaaagattatacagaaaaaactgagcctttatctcgtcttattcaacgtcgtattgagggacgtgccgattctgaacgaaaaagtttttggcattttttccgctcctaatagagaaaagcgagcattttttcgcttttctttttttctataatttctaagagtgactgctccgacaagttttgcgaacaggtgttagctatttacagtttactgcgttccttttaaaatacaaatatcagttataaactggatttatcatatataaaggaatctgaaatgcaaaacgcttgtacacttaataaaaaaagtagttattcttatgatgatttgctcgcgtcaggtcgcggcgaattatttggtaaagaagggccacaattacccgctccaacaatgttgatgatggatcgtattgttgaaatgaatgaagaaacaggtgctttcggtaaaggatacattgaagccgaacttgatattaaacctgaattgccgttctttggttgccatttcattggcgatccagtaatgccaggttgtttaggattggatgcgatgtggcagcttgttgggttttatttaggctggattggtggcaaaggaaaagggcgagcattaggggttggcgaagtaaaattcacaggacaaattttgccgacggctaaaaaagtggtttaccgaatccatatgaaacgagttattaatcgtaaactagttatgggaatggctgatggtgaagttgaagtagatggtcgtgttatttataccgcgacagatttaaaagtgggactattccaagatacctcaacattttaatttttctttattaattcatacaaaagtgcggtgaaaatttttcttagattttcaccgcacttttacttattaaattgtaataaattcttaaaatatctataatattcttgttgtttttaattctattagtggtaaataaagtttattttaaagtttttaataaacgttattatagaaaatattaaattaatttctatttaaattataaataatatactaaagtagtgggaatatgatggtaaatgatgattttcaagaatatgtgaagcaactggtaacaaaacatcgagatgaacgaatttatccttttcaatataaaggaaaaaaatattggttgaagcaacctgaaaaattgaaaggtatttggctattattaaaaccccatcctaaaaaatcttttaaaaatgaattatatactttattgaagcttgctgaacaaaatgcgccagtgccaaaagtctcttattatagtgatcatttttttgttttagagaatgtgggacttaccgtatcacaatggctatgtaataaaaatatagatgaacaacagaaatttttaattatttatgatgcttgtctcgctttgattgatttgcatgctaaaaatttggtgcatggtcgtcctgctattcgagatattacttgggataaagggaaagttacttttcttgattttgaatctcgttcaaatagccgaaatcaaaattgggtagttattcgggatatgttatttttctttgatagtttatgtcgagaagaagatatttcggacacttttattcaaaaagtagcgttgtattatcaaacacattgtgaagcgaaaaattggcaaaatatgatcgtatttttgcaacgttttagctgggtttattatcttttattgccttttaaacctattgcaaagacagatttaatttcgatttatcgcttatttgaaattttcttgataaagaaaaaatgatgaagaaaatattttttatttttgtattatcaggcatattagctgcttgtactgtgggtggtggtgttagtgctggtggtggaagtaatggtgtaggattaggtgtggggattggatctggtattcgcttctaataatgaaaagtgcggtaactttaatctttatcttgcatttgaacttattcatcgttagaatgcgatttccttgtcatcgctgagttagagatcggcgaatgatgtattaataacactaccttttaggagtaaaaaatgtctctaagtactgaaaaaaaagcagcaatcgttgctgaatttggtcgtgatgcgaaagatactggttcttctgaagttcaaatcgcattattaactgcacaaatcaaccacttacaaactcacttcgcagagcacaaaaaagaccaccatggtcgtcgtggtttattacgtatggtttctcgtcgtcgtaaacttttagactacttaaaacgtactgatcttgctttataccaaagcactatcgctcgtttaggtttacgtcgctaatttttattacgatagtaaaaaatcaagccctcgaatatcgagggctttttttatggggatgtactagatagcttcaatttcgccttcaaacatttccaaatgtgggcttgtttgataaatgagtaagcgtaatcgatgaaagtaatagtggctgtatttttgtttacattaaccaatttactggctgttcttgctgtgacacctacggcaaacagttcaatgagtttattttatttatgctggcttaagtgactttttctcattggtttattctaacctaaataggatttttagttgttatctactacagcaccttaatagttatagagttcgttatataaattacgctcgaattgtactaatggggcacgttttgttttgctttccaaatcgcccgttgagtagccattaataaattgtacaaatgccactttttcccctcgcgcatttgtcataaagccagctaggttataaacgcctttcaaagaaccagttttagcaatcacgtttttcactaatggcgggctaattaatccacctcgcccactgatcgtgccatctacacctgcgatggggaaagtttccattaaatgtagtttatcttcgtttttggcgatgtattctaaaacggatagcatcgttttaggtgccacaagattatggcgagatagacccgaaccatcggctaaaatgctattaccaaaacgaattccttgtttttgcaatatggatttaaccgctaatgtgcctaattgaaaggaggcggggcgtttatagtaattgaatgccaccgctcggaataatgaatcggcaatttggttatcggattttttcatcatttttttcaataaatctggtaatggttttgataaatgtttcgctaatagctgaccttgttgtggtttttggggtaacaagactttgccattgaactcaatacctaattgtcttaattgacgttgaataatcgcggcagcataagcatccgtattttgcacggcaaaacttaagccaaaaggtttatattgacgggctaaacatccttttacttgatagcgattattgtcgtgtacaacaacatcgagctgacaataaggagcttcattgctatctactacataaacttgtccgaacacttgaattggaaattgtgcaggcacattaatttttactatttcacctggatttttattcgcatctagttccgcatagaaacagttgttatcaatatttgcagctgctggtggagagttgaaacacattgtgagatcgttccaaatccaacctaatcctcggtcgtgactagaaaaaacagaggtatctaatactaaatcgccattaatttttttgatgccttgtttttttaattctgcaagtaagctataaagctgacctcttgtgagatcaggatcgcctgtgaaactcacgattaagttgccatctaaattcccattttgaattttcccattactcaaaagtgcggtctcaaattggaattgatcgcctaatgcaagtttagcggcaacggctgtaaaaactttttgtgtactcgcaggcagcataaaggttgagccattataattagcaattatttgattttgattgatatttttagcaataacacctgcgttagagccttcaggcagtttttgtgttaaatctgaaacattaatattggcgaaagttggtaggctaaaactcactgaaagtaaaaaggaaccaagtgcggtggaaattgaagataattttttcatattaggtttgttatggttgctatttttttttagacgaacaataataagccccgaatgaaattgagtaaatcattttctcatttcaagtttatttttgataatactgcagtaagattttagaattttactgtggtttttgttttatttagtaaaaggaaaaaaaatgcaacaaattccaatgactgtgcgtggcgcagaacaattacgagaagaattggatttcttaaaaaatgtacgtcgtccagaaattattaaagccatagcagaagcacgcgagcacggagatttaaaagaaaatgcagaatatcacgcagcgcgtgagcaacaaggtttttgtgaggggcgtattcaagagattgaaggtaaacttggtaatgctcaaattattgatgtcacaaaaatgccaaataatggtaaagtgatttttggtgcaacagttgtgcttgtaaatacaaatacagacgaagaagtcacttatcgcattgtaggcgatgatgaggctgatattaaatctggtttaatttcggtaaactcgcccattgcgcgaggcttaattggtaaagaattagatgataccgttaatattacaacgcctggtggtgtcgttgagtttgatattattgaagtgaattatatttaaataaaaaaagtgcggttaaaaatgaccgcacttttgttgttatttgcgtggaagctgaatttttgcttcttcgcttgggcgataaagcaccaaaatatgcccgatagtttgtacttgtgctgctttagtttcacgcacaatcgcatcgataataagttgttttgttttgcgatctgcaccagcaacttttactttgatgagttcgtgataattaagtgcattttcaatttcagcaagtacgccttcggttaagccatttccaccaagcataacgactgggttaagatggtgcgcaagaccttttaaaaattgtttttgtttggttgataaggttgtcataaggattcctaataaaaaagagcggttgattttctcaatgtttttcactgatttcaatcagcctcggcttgaatttgacagattgtacccaaatataggcgaaacgactacaaaaaatagaagattatgggaaagaaaaaacgttcagcgagttcttctcgttggctaaatgaacattttagtgatcaatttgtgcaaaaagcgcataagcaaaagttgcgttcacgtgcttattttaagattgatgaaattcagcaaacggataaattatttaaacaaggaatgaccgtggtcgatctcggcgcagcaccgggcggttggtcgcaatacgtagtaagtcaaattgggggcaaaggtcgtgtaattgcttgtgatattttggaaatggatcccattgtaggcgttgattttctgcagggcgatttccgtgatgaaaacgttttgaatgctttattagtgcgtgtaggcgaagataaagttgatgttgtgatgtctgatatggcacccaattttagtggaatgccatcagtggatattccacgcgcaatgtatttggtcgagcttgctttagatatgtgtaaacaagtcttggcaagcaaaggaagttttgttgttaaagtctttcaaggggaaggctttgatgaatatttaagagaaattcgttctttatttaatgtggtaaaagtgcgtaagcctgaagcatcacgcggacgatctcgtgaagtatatattgtggcaacaggctataaaggttaattgctttgatagcttttcattgctaatgatgtgtagtatcttgtgacgaaatttttttaacttaggaaaggtaggttagactttgaacgatatggtcaaaaatctagtgctttgggtggtagtggcagtcattatgatgacggcataccaaagttttaattcatcttcagtagaaaattctactgattatacaacctttgtttacgatgtaagcaatggacaagtgacagcggcacgttttgatgccaatgaaattacggtaacgaaaaccgatggttctaaatattcaaccgtaatgcctccacttgaagacaaaaaattgcttgatgatttattaagcaaaaaagtgaaagtggaaggtacgccatttgaaaaacgtggtttcttatcccaaattttaatttcttggttcccaatgttatttcttgttggcgtatgggttttctttatgcgtcaaatgcaaggtggtggtggcaaagcgatgagctttggtaaaagtcgcgccaaaatgctgaatcaagatcagattaaggttacttttgcggatgtggctggttgcgatgaagcaaaagaagaagtgggcgaaatcgttgatttcttgcgtgatccgaataaattccaaaacttgggcggtaaaattccaaaaggtattttgatggtagggcctccaggtactggtaaaaccttgcttgctcgtgccattgcaggggaagcaaaagttccattcttcactatttctggttctgattttgtagaaatgtttgtgggcgttggtgcatctcgtgtacgtgatatgtttgaacaggctaagaaaaatgcaccttgcttaatcttcattgatgaaatcgatgctgtgggtcgccaacgtggggcgggtttaggcggcggacacgatgaacgtgaacaaaccttaaaccaaatgttggttgaaatggatggctttagtggtaatgacggcgtaattgttattgccgcaactaaccgtccagatgtacttgatccagctttaactcgtccaggccgttttgaccgacaagtaattgttggcttacctgatgtgaaaggtcgtgagcaaatcttaaaagtgcatatgcgtaaagtgtctgttgcgcaagatgttgatgcaatgacgttagcgcgtggtacgccgggctattctgnnnnncattccattcattaattaattaatgaatgaatgnnnnngaaatcatcacccacaagttgaaaaccatcaaaaattacaccgcacttttcggcttcttgtaatgcgcgattcacttctgcgttattattttgtgggaaaagactatcttgctcagggcaaatgacacgcatagcaaaaccttgtgcgccatcttcttccgctaaatataaaggaatttcacgtccgataatttgcccattataccgccattgatcgatcactgcattgagtaaacgactttgtgattcaatattattttcgagcgcagtcaggcgaaaataggtttcgattaaatacataaattttttaattgctgtccgatttggtttaagccgtttaaacgcatttcacttaaacgttgtgaaatgccgagttcgctaaaaaatacagtaatatcaaatgtattcaattcatccgctgttttaccattgattttattgaataaaatccaaagcaagccattcataattctggcttcgctaaatccgctgaattgaaaagtgcggtcatgtttaggcataatttgaaaccacatttgtgcttcgcagccagtaataggttgcatttgagcgagttcattatcgcttgggcgaggtaaatttttgcctgcttgaataatcaggcgatagcgatcttcccaatttttagcttgttttaattgttctatcattgtaataaatccagtgctttatctaaggcggtgaagaatgcctctacatctttttttttgcgtattataaggggcaaaagaaagacgcaatgtggtgcgttcgtctaagcgtgctaaataaggctgggcacaatgttcgcccactcggagcgcaatattttgttcgctcaaaagtgtagaaagatcggaacagtcaatgccgtcaaatataaagcaaacaacggtgcttggttgaggagaatcgaataatcggcaattctcgtaagattttaaccgcactttgacggattcagccaaggatatagcgtgctgttctgctgcggtaaaatcccatttttgtagccaatccagcaccgcattaaagccaataaccccagcaatattgggtgtgccagcttctaaacgataaggcaattcggcaaaagtaatacgctcatttgatacccgatcaaccatttttccaccgaaaaagagcggttgaagttgagaaagtgcggtcaattttcctgttaaaacgccaagcccatttggaccataaattttatgggcagaaaatgcgaggaaatcggcatctaaatcttgtaaatcgattttaatatgactaatcgcttgtgcagcatccactaaaaccaacgcatgactatgttttctaaccagttgaatcaggcgtttaatcggctgttctgtgcccgtgacatttgaaacaaaattcagcgcaacgagttttgttttttcagaaagggtagaaataagcgcattttcatcaattagccaattatctaaaatcggtaaaactcgaatttttgcaccgcactttttcgccgtttcatgccaagtgacaaaattagcaacttgatgaaccaaccacttggatgtagaagccattgaatggttggaaaatttcttactggatttccaaggtagcattgtatttatttcccatgaccgttcttttattcgcaaaatggcaacacgtattgtggatttagatcgcggtcaattgcagtcttatctaggcaattacgatttatatttaaccacgaaagaagaaaatctacgcgttgaagccttgcagaatgaattatttgataaacgtctagcacaggaagaagtgtggattcgccaaggtatcaaggctcgccgtacaagaaatgaagggcgagtgcgagcattaaaagcgatgcgtgaggaacgccgccaacgccgtgatgtaatgggaacagccaaattacagttagatacctcaagtcgttcaggcaaaattgtctttgaaatggaaaatgttagctatgaagtcacaggaaaaactttgttaaaagatttttcaacaacgattttacgtggagacaaaattgcccttgttgggccaaatggctgtgggaaaaccacgttcattaaattattgttgggggaaattcagccaacatcaggaaaaatccgttgtggtactaaattagagattgcttattttgaccaataccgtgctgatttagatcctgaaaaaaccgtaatggataatgtggcagatggtaaacaagatattgaaatcaatggtgtaaaacgtcatgtgctagggtatttgcaagatttcttgttcccaccaaaacgtgcaatgaccccagttaaagccttatcggggggagaacgaaatcgtttattactcgcaaaattgttactcaaaccaaataatttattgattcttgacgaaccaaccaatgaccttgatgtagaaacattggagcttttagaagaaattttgactgattatcaaggcacattgttaattgtgagccatgaccgtcaatttatcgataatactgcgacagaatgttatttattcgaaggtgaagggcatttgaataagtatgtgggaggattctttgatgcgaaacagcaacaagccaatttttgggcaagcaaagcggtggaagaacaggctaaggcgaagaaatctgaaccactaaaagaagaaagtgcggtgaaaaatgaccgcacttctaagccgaaatccgtgaaactttcttataaagaacaacgtgagttagaacagctgccacaacttttggaagagttggaaaccaaaatcaccacactgcaagctgaaatagccgatccagcatttttccaacaagctcacgatattaccgacgctaaattaaaagaattggcggatactgaagccgaattagaaacagcatttttacgctgggaagaattagaagaaaagaaaaatttggctgaaaacaaaaattaaaggggttattctagataacgactgaaaactctattggggttaagatagcggaatgagtaaaagtctcttaagttagtataagtaaaataacttattgagctatttgaaatctgtgtgatttatctagcgacacagtgtaaagttttgttagatgatactcttcgcttaaaaggtaatcctaaagacttgactttttagtattgtatgatcgatatctttaattttcaaatttagcttttgtcctctcttatgtttgtttaaaatttttacgaagtagggagaagttatcgtctcgtgttgtaatttagtatggggaggattgatcaaaattcttttgctacaatacaggttttttatgaaatttaattaatatagttagatatacaagtttttatataaaattcaatatcttctttactataacctaataattttcctatttttctttcataatttaaattgaaacaatttgtactttttttgagtaaaatcgatagtttttttgcttttcttttatgtttttttgtatatattatatagtaataaaatttattaccgttagaatctattgttctaactttttttcttttaaagaaaccattttccaaatatgggataaatccatatggaatattataatcagtataaaaaagagctaaatnnnnncattccattcattaattaattaatgaatgaatgnnnnntggatgtagaagccattgaatggttggaaaatttcttactggatttccaaggtagcattgtatttatttcccatgaccgttcttttattcgcaaaatggcaacacgtattgtggatttagatcgcggtcaattgcagtcttatctaggcaattacgatttatatttaaccacgaaagaagaaaatctacgcgttgaagccttgcagaatgaattatttgataaacgtctagcacaggaagaagtgtggattcgccaaggtatcaaggctcgccgtacaagaaatgaagggcgagtgcgagcattaaaagcgatgcgtgaggaacgccgccaacgccgtgatgtaatgggaacagccaaattacagttagatacctcaagtcgttcaggcaaaattgtctttgaaatggaaaatgttagctatgaagtcacaggaaaaactttgttaaaagatttttcaacaacgattttacgtggagacaaaattgcccttgttgggccaaatggctgtgggaaaaccacgttcattaaattattgttgggggaaattcagccaacatcaggaaaaatccgttgtggtactaaattagagattgcttattttgaccaataccgtgctgatttagatcctgaaaaaaccgtaatggataatgtggcagatggtaaacaagatattgaaatcaatggtgtaaaacgtcatgtgctagggtatttgcaagatttcttgttcccaccaaaacgtgcaatgaccccagttaaagccttatcggggggagaacgaaatcgtttattactcgcaaaattgttactcaaaccaaataatttattgattcttgacgaaccaaccaatgaccttgatgtagaaacattggagcttttagaagaaattttgactgattatcaaggcacattgttaattgtgagccatgaccgtcaatttatcgataatactgcgacagaatgttatttattcgaaggtgaagggcatttgaataagtatgtgggaggattctttgatgcgaaacagcaacaagccaatttttgggcaagcaaagcggtggaagaacaggctaaggcgaagaaatctgaaccactaaaagaagaaagtgcggtgaaaaatgaccgcacttctaagccgaaatccgtgaaactttcttataaagaacaacgtgagttagannnnncattccattcattaattaattaatgaatgaatgnnnnncaaaccttaaaccaaatgctggttgaaatggatggctttagyggtaatgacggcgtaattgttattgcagcaactaaccgtccagatgtacttgatccagctttaacycgtccaggccgttttgaccgrcaagtarttgttggcttacctgatgtgaaaggtcgtgagcaaatcttaaaagtgcatatgcgtaaagtgtctgttgcgcaagatgttgatgcaatgacgttagcgcgtggtacgccgggctattctggtgcagatttagcaaatttagtcaatgaggcggctttgtttgctgctcgagtgaataaacgtacggtaaccatgcttgagtttgaaaaagcgaaagataaaatcaatatggggccagagcgtcgcactatgattatgacggataagcaaaaagaatccactgcttatcatgaagcaggtcacgccattgtggggtatttagtgcctgaacacgatcctgttcacaaagtgacgattattcctcgaggacgtgccttgggtgtgacattcttcttacctgagggcgatcaaattagtattagccaaaaacaattagaaagtaagctttctaccttgtatgcagggcgtttagcagaagatttgatttatggtgaagaaaatatctcaacgggtgcatcaaatgatattaaagtcgcaactaatattgcgcgtaatatggtaacgcaatggggattctctgaaaagttaggtccgattctttatacggaagatgagggcgaggttttcttaggtcgttcaatggcgaaagcgaaacatatgtcagatgaaaccgctcatgcaattgatgaagaagtgcgtgcaattgtaaatcgtaactatgcgagagcaagagagattttgaacgacaatatggatattcttcatgcgatgaaagatgcattagtcaaatatgaaaccattgaagaagagcaaattaaacaattgatgaatcgcgaacctgttacaccgccatcaggttggggagagccgaaaactcagcaggctgcttatgcaaattcaacaacgaatgatacaaagcccgaaagtgcggtagaaaataccgatgattttaatgtttaactcatcaaagcctttctttcggaaagactttatttttttcctaatgattttgttccttggatgtatttcgctataatcgcccaccaaaatcactctaaaaattnnnnncattccattcattaattaattaatgaatgaatgnnnnnttttgctccgcattattgaacaggtatacacgggagatctagcaccacctttaatctcagatagctctttctgagataatactgtaacactttcactttgagatgatttgaataatgattgcacgtcattactacttgctagcgaagctgatgaaaaaataatggctgttaataaaataaaaaattttttcattaaagttacccctattaattgattagttatagatttagtatactactcagataagtgtgagaattatcctgcataatctcacgatacatataatatatgtttgtttcttgaaagttaactgtttttacaccattttttgtcacttctagtaactctgattcaggggtttgcataataataggtgaatgcgttgcaatgataaattgggctccatttctacttagagttacgattctttcaataaatttaagctgattgttgagagataaggaggattcgggttcatctaatatatatagcccatttttgttaaatctattcatatatagtgcattcattgattctccatgagataatttatgtaattcaatccctccatagtaagaatttattttaccccctccaaattctggcgcatctagttttttcatttcactcataaaggtataaaaagtttctgatctataaaaaaatatatctttaggaaatttagttcctttttttatcatcatatttggtatttggatatgtgtattttcagttgaaaaattaaagttttttgaaccgccttctgctgggcaacctaaataaatagctatagcctccattatggttgatttacctacgccattttcaccaataaatatagatattggtttattaagttttactgggaataaataatcaagaaagaagtggttcttattatttctatatatttcatatatgtacatatttaatttcttaataataatctatgttttgttttaatattgtcaataaactctaagtgatcttttgaatctctatgcaagtataaaatatctccttttttatcatttctcaatagccatattttttcaaagtcagaaacttttagtgagtaatttccaattgctggatctgatattaataactctttattaaaaataccattgatgataataaaatgatcattgtttaaactgttgtttacataggcaattactggtttatttatgtttaataattcctttaacgttaatgctaatccaatagcatttatattgaattcttttgaaattcttgcaagttcaaaaaaggatgcttcttcatttggatttttcaatttatatagaatagtatcttcgttaatttcactaatatgaaatttatattttagcattgtggcaagagctgctgctccacaagaattattttttgtttgcctaataatattgaaattcttaaattcattatatgaaacaatttctcttgcagatatataatctgatatacataataagataattaaattataaatctttctcaaagttaaggtagattgtagcacctgaattacctgttgtattaaaagaagtttcaaaatataaacgattttttaaatttaaattatacgatattcctatagataaaaagttttctattccagatacatttgttactttttcattgtacttttcactactttttaattgtatttctgtagataaacttatagatatctgtggattaactaaaaaatctactctaggttttatatttattacatttgatggtttgaaatattggttatatttttttatctttgagtaatatttcaatcctgtttttaaggataaaactataggatctatagttttatctattatataatctaaatagaaatttttaaaaaaacttgtattttcatttttaattatggcatctgatgaaaagtatattgatttattccaatctgatttaaagttatttaatttagtagataatccaatatttatcgtatcaaatcttaatttatcgtatgattgttcctttctactttcttctctagatacaaatgagtatttactgtatgaactattaatactaccagatatattaattttatttgttaaaccataccgaattccttgttcaaaggatagtacttgatatttttcacttccatatgaattgtcataattttgtatatcaaatacatttcttcttaaaaattcatggctgttttttaaatgtaatgaagatgatgttactaatgtgaatttaccagagttgtcaaattcatcatttaatgtaataaaattataattattagaataacacagtattgggttgaatataaatataaataatattttgtttttcatatatatccttatatagtttaatagattattattaaacattgtagaatattaaatagttatattctagaattatttaatttctgtctaggtttattggatttctaggttgataattaagtatctattctatctaacaaactgactaataatctttaagttttaaacacgatgggctaatttacaaaggtccttctttgtacataacttttattaattccaataattgttggaattaagacgtcctttttaaagtcaagaatgcagcgtatttatctttaattttttataagaatttcacggaatcaacagttaggtattttctgcgcggatactacgatcataaattcgcttaatcgctgcctgaattggctaatatgcgttatctatactaatttctagaaatttatgaacaaaatcagctactgtgaaattaaaaatttttcaataaggctataagcctttaccacaactaaatcatttataatcagcaaaaataattattgctcgtatattatcaagttaatttaaaatgacacataaaaaatgtcaatgattacaggaaatttattcgtttataaatttctcaatcattgaagataaaggcttcttgatatttcaaaacaagtaaaaccaaaggaactgtactatataacgactaaaaactctatttaggttagggtagccaaatgataaaggctatcataagtcagtatgaacaaaataaacttattgagatatttgtagcaggtgtgacaaaacgattctcagcagggttggtttatataaataaaactacttcatcttactttcatcgtctgcgattatttatttatcaaagtagctcgcatatggaaatatttgaagataaaactgaagcgaatgaaagtatttttgtatcaatcacagcacacacttctcagaaaaacaaaaccatataaacgaaattgaaaattttggaataagagaagcgtcatttgcgaaagtttaatggcagtctccaatgcatatttggagtaatatttaaaggaatgtgaatagcattttaatcaaagagatttaaaaactaaaattacaattagttaaggagagtttaagttagttaaaaaaacgcccgaaagggcgtttttatttagaggaaatattgcacagaatcagattttaattctttgctaattgaccaattattttgctgcttttaattcttgataatattgttcatagaattgaattgcatcgccaacgtcatcttgccagtgactattttttaatatatcagctgacggataaatcgctggatcttcagtgatttcttttggtaatgcttttttcgcttcaatatttgaggttgggtaaccgatagctaaggttaatttttcagctgtttttttccctaacatgtagttaatcagcttgtgtgcgccttcaggatttttagctgttacaggaattgcaagagtatcaacccaaagtacaggaccctcttttgggaataccatatttaaaggtgctttttcttttttagcaatacgtaccgaaccattccataattgacccacttccacttcacctgaaatgaacgagttagctgggttatcggaattgaaagaaagtacatttggacgtaatttcaataattcttcataggcttgtttgataatggctggatcttgagtatttggatcttgaccaattttcaataaagcgatgttgaatacttcgcgcgcatcgtctaataactgaactttgtttgcaaattctggtttccataagtctgcccaagaagtgaattgttcgcctttgtaagtgttggtattgaatgcgatacctggcgcacctaaaagttgcggaagagagtatttgttacctttatcataaggtttattgagccaatcaggatctaattctttaagaacaggtaatttgctgtgatcaagttcttttaacattccttcgcgtgccattttagaaacgaagtagttagaaggtgcgataacatcatagccaccagactcgccttgagttttgagtttagcgtacattgtttcgtttgattctaggcttgaaacgataactttgatgccagtttctttagtaaactcatctaaaagaccatctggtacatattctgtccaagtgtagagatacacagtgtcattagcagcagccgtagcttttgcagtttcttgcttagcatctttatcgttgcaagcggttaaagttgcagctacgaagctggcagtaattaaacctgcaaattttttcatttttgtttgttctcctgttaaagagtcgtaaaaaaccgcctgccgaatgacaggcataaaaaaacgccttgattgtgcgtcaaggcgtattctattttaaattcaaaggtttgtgaaaccttttgttaattaatggttattttttcgtgtaattagctggcttaaaacgacaagagctaatgaaagcacgatcataatcgttgctaaagcattaacttcaggtgttacaccagttttcactagagagaatattctcaatggtaagatttcataacttacaccactgacaaatgatgaaaccacaacatcatctaatgaaatagtgaaacttaataaccaaccagatacaactgcaggtaatgctaaaggaaggataattttacgtaaaatggtcacttcgcttgcacctaagtctttcgccgcttctaacattctggaatcaaagccatttaagcgagagaagatagttacggtcacatacggtaaacagaaagttacgtgggcaagtagtaaagaccagaagcccaatgaaatacccacaaccataaataatgcaagtaaagatactgccattacaatatctggagacatcataacgataaatagcataccgcttactgcttgtttaccgcggaatcgatagcgataaagtgcgattgcagttaatccacctacaatagtagctagggtagccgcaaaaaatgcaatagttaccgaatgaatcgcagcttgtattaaggtgtcgttattaaataaacgctcgtaccagttccagctaaaacctttccaactcaaaccataacgatctttgttaaaggaattagtgactaaaataataattgggatatacaaataagcgtataccacaaacataaatgcattacgtagtaaacgactcattattctaactccactttcttatttaatagtttgtttgctcggtagtacacgaaaatcaacaatgccattagaacagttaaaccaatactgactgcagaaccaaatggccagttacgagaaattaagaattcgctcttaattacgttaccaacaagcaatacttttgctccaccaagtaggtctgctacataaaacattcccattgctggcaataataccaataaacagcctgcgataatgcctggcatagttaatggtaaaatcactcggaagaaacgttggaacgtatttgcacctaagtctcgtgctgcttctaataaacgatgatctagtttttcaatggcagagtagagtggcaaaatcataaatggcaatagtaaataaactaagccaatgattaccgcaatttcggtattcaaaatacgaattggcgcactcaaaattcccatatcaattaacatcgtgttaagtatgcctttcacgccaagaaataccttcattccataaatacgaattaacgagtttgtccaaaatggtaaaaccacaaggaacaataagagcggtcgatatttaggatgaattttactcatcataaaagcaaatggataacctattagtaagcaaataatggtggcgatgcccgacatagacaatgaattccacacaacttgtgcataaagcggattaaacaagtttgtatagttttcaatagtaattgggaatgcataaaagttgctaccatctcgagtcagaaaacttacggcaagtaccaataagtttggaatcagcacaaagaagattagccaactgaagataatcgcaacagtaattttctggaatttattattgattatcttcatcgttgagtacaacctcccagccttcgtgccatgtgatacctacgcgttgtcctatgctatgatccatatgtggatcatcttcattaaagaattcacttacaaggacacgcattccgttatgatcaaactctaccgttgattctaatgtcattcctttataagtgcggtcaataatatgaccgataattgctttagaatgttcattttcatctaattcttcaatcacaatatcttcagggcgaaggagtacttgaagtttttgatctttttccacaggcatatccgtataaatatcacaaatacgaccttcaacatttgccagtacaacttgttctgattttcgttcaatcacagtggcttcaaatacgttaatttcgccaatgaaacgagcaacgaataagttagctggatcttcatagatttcacgtggagaaccatcctgtgcgattttacctttacgcaataatacaatacgatcagacattgtaattgcttcttcttgatcgtgggtgacgaaaataaaggtaatgccaagctgacgttgtaacattttgagttcttgttgcatttgtttacgcaatttgtaatccaatgcagataaagactcatcaagtaacaacacttttggtttatttactacggcacgagcgatggcaatacgttgttgttgtccgccagaaagttgagttggcttacgatccgccatttcttctagctgtaccatacgcaaggcttctaaaacacgcggtttaatttcctcgtttggtactttttgcatacgcaaaccgaaagccacgttctcaaaaattgtcatatgtggaaatagcgcatagctttggaataccgtattaatatgacgtttttccgctggcacattggtgatatcttcaccatctaaaataatgctacctgaatccaattcttctaagcctgcaagtaagcgtaaaactgtggttttaccacagcctgaagggccaagaatagtgacaaactcaccgttattaattgtaagattgaaatcgttaataatggtgttagaaccataggattttttgattgaacgaagctcaataataggcttgttttgaagctgattttccactagctttggttttctccctaatttcaccaatgatttggtactgagtagaaataaaacctgcaagactgcaggggcgacatataaaaatagacgcctatgatatagtgaattgttaataatgaaaaggacttaatgccttagaaagtaaaaaactgccgttcataaaaataacgagaaatttaaccgcactttcgatgaattttacttcgttaattttataaatattgttatatatcaagatgttttctatttttctcgttaaactaaaaaagatatttttaaaaggagcgagaatatgatttctcaaatagataaaatagaacttttagaacgatttttacattatgtgtcttttcacacccaatcaaaacctcatgcgaagcattcccccagctcagtcgggcaaatgaagttagccatgcagttgcaaaaagaattaatccaacttggtttggagaatgttgaagtaagtaaatatgcagtggtaacagcatttttacccgctaatgatcctaacttaacgaaaaccattggtttagttgcgcatcttgatacgtctccacaatgtagtggtaaaaatgtacgcccagaagtgatagaagaatatcgtggcggagatattgcattaggtattggcgaggaatttattagccctgtttattattcttttatgcaaaaattagtcggacaaacgcttattgttactgatggaaccactttgcttggggctgacaataaagcgggaattgcagaaattatgaccgcactttccattcttcaaaaagagaatattccccattgcaatattcgtgttgcttttacgcctgatgaagaaattggtttgggaatccattatttcccaatggaaaagttttcctgtgattgggcatataccattgatgggggagaagtaggggaattagaatacgaaaactttaatgctgcaacggcaaaagtgcggtttttcgggcgaaatattcacacaggttatgcaaaaggaaaaatgctgaatgcactgactttagcttgtgaatttcagcaagtttttcctgttgatgaagtaccagaaaaaaccgatgggaaagcgggcttttatcatttagaagatttttctggcgatattgagcaagtagagcttacctatttgattcgtgattttgacgaacagaatttcgcacaaagaaaagcttttattaaaaatcaggtggaaaaatttaatgctaaaaaaggtttgaaaaagcctatagagttagaaattcaagatagctaccaaaatatgtatgatgtggtaaaaaatgttcctcaatcaattgaacttgctgatcgcgcaatgaaagcggtgggaattaaaccaaatcataagccgattcgaggcggtacagatggggcatttttagcctctaaaggtttagcatgcccaaatatttttactggtggctataatttccatagtaaacacgagttggtttctttacaaggcatggaaaatactgtccaagtaattatcgaaatgctgaaatgtaaagatttgtaaagaaatgtaaagatttttcttgctattctttagattgctcaatataatggcggcgttttatcgagatttctttgatgaagctaaactttagagattttattcataaattcctttttaatgcccctaattatttaggggctttttttatctaattggacaagaaataataaaatagttaataatcacaatttttaacgctctacaatatttatttctatagatttatttactgatttaaaaaaacgttaaatttagtggctaaattagtttaaagagatcactgtgaataagaggtataagagtttcctttattcagactgaatttgacattcctattctaaataggaaactcttacttttgaggtaatttgttagatcaaatttgatcttagacaaattaaatttatctaactttattgagttagattaattgcaggttagttttcgttagcgttgaaatttattcattaattatggcaagtttggcacgctgcttggaacatccatactaatttttcttgttctttaatatagtcactcatttgtgatgcagtaccttcatcattagcgttatttgcaaaagcaagaatttcacgttgttgatctagtaatgtttttagaccttgtaatgtgcctgataaacattcttgtgcctcacttactgcaatatcttctttaattcgagatatttttaagtattggctgtaagcattatttggtgtgtaacctaaagttaaaatacgttcagccacctcatctactctagcaactaaattagtataaatttcttcaaattttgcgtgtaatgcaaagaagtttacgcctttaatgttccagtggtagccccgtacattagtatagaaaacttggtaggttgcaagtaattcgttaagtttatcggctaattctgctgattgaactttatctagtccgattgatgtttttgacataataatttcctttttctagttgaataattgagctaatgccctccctttgatatgggtattatacgtttctataatttgaagtgaaattgttctattcaatataattgatagtcttagccttatttgttaagaaattgtaataaatagaagctatcaaataagtgatcaagatcacagttttaatgaatatttaatcaaactatcgcggctaacaataaattttgatttaataagtacagtgataatttttaatattttttctaaggatatgttatgcaagaacttattaagcgcaccttgccacaagatgatgcacttaatcaagctattgtgaatgaacttcgttcacaaaattgggctggttttttaaattattcccaagtgcagcagctttgtcataattttgaacttaccccactaaaattggctatgcacttgttgccacttgctgcaagttatagtcatactgctatttctcattttaatgtgggggcaattgctattggcgaacaaggggatttttatttcggcgcgaatcaagaatttgctaattcagccattcagcaaacgattcacgcggaacaaagtgcaatttctcacgcttggttgcgtaatgaacgccgtatttcagatatggtagtcaattacacgccgtgcggacattgtcgtcaatttatgaatgaattgcacggtgctgaaaaaatttcaattcatttgccgcatagccaaaataatccattacattcttatttaccggatgcttttgggccaaaagatctcgatattgcagcgcatcttttggcggatgaaaatcatgatttagttgctgatcatcaagatgatttggttaatcaagctattttagcggcaaatcaatctcattgtccttattcaaatagtccgcacggcattgcgattttatttaaaaatggtgatgtggtgacaggacgttatgcagaaaacgccgcatttaatccaagtttgccagcgttgcaaaccgcacttaattttgcgtatttaaatgataaaaaattgagtgatattgaacgaatagtgatggctgaaaaagcattaaaattgagccataaaacgatggctgaaaccttattatccacattaacttcagtagaattagagtattattctttgtaaagatgaaacgcgagtaaaataaaaagggaataattcccttttttatttgttcgctaaaattaccgctcttttcggtgcttgataaccttcaatggttttactgtgatcgtttggatctaaaaaatcaattaggctttcattttccaaccaatcagttttacgctgttcttctaatgtagttgtcgctacatccacacaacgtacgttggtaaagccaactttttctagccagttaattagtgcggcgacagaggggataaaataaacatttttcattttcgcatagcgatctgctggtacaagcacagtatttacatcgccatccaccactaatgtttctaataccaattcgccaccttttaccaattgatttttcaattggcttaaatgatctaatggggatttacgatgatagagtacgcccattgaaaatacagtgtcaaatgccgctaatggttgcatttgctcaataccaagtgggataagatttgctcgacgatcattattaagcagtttgcgtacagcttcaaattggcaaaggaaaagctcggtaggatcaatcccgaccaccatttttgcgccttcgcctaccattctccacatatgataaccgctgccacaacccacgtctaaaatagtgcgaccttgcaggggagctaaatgaggaagaacacgatcccatttaaaatctgaacgccattcacaatctacatgaataccgaaaagatgataaggcccttttcgccacggcattaattgttttaaatgatggataattcgttgtttttcaccttctgaaaggggagaagtgcggtcagatttcaccgcactttttagatcgatttcatcagcatgtaaatcaggtagaaaatcaacaattttgctccatttcgcataatcgccatgagtttgagtttcccattctttcaattggcacggtaaggtctctaaccagtctgataaatttgtagtagcaatttgttgataaaaagggcgaaagtcgatcattttgcttccttataagccttttctgctttatcaaaggtattaagaatatcttgttctggtttattggaaagtaatgaaataacaataattgcaaggctggcgaaagcaaagcctgggatcatttcatatactttaaaccaatcagtatccgctggaacaacttctttccaagcaaatactgtcactgcgcctacaagcatacccgccattgcgcccgatgatgtcattcgtttccagaaaagagagaaaagtacaacagggccaaatgcactaccaaaaccagcccaagcgaattctacaagttttaatactttgctgttttcatcttgtgcgatccagatagcaagtgcggcaataactaacaccataattctgccaagccatacgagctctttttcagatgcgttagggcgaataaaacctttatagaaatcttctgtgattgagcttgaagaaattaacaattgcgcgcttaatgtactcattacagcggctaaaatagcggaaagtaatatgcccgcgatccaaggattaaacaaaagtttagcaagttcaataaatacttgctctggttcattattgactgtgcctgcaatagctggattggcaaagaaatacggaatagcgaataagccaatgccaattgcgcctcctaagcaaagcaccatccaacccatactaatacgacgtgctttgataagtgatttgacagaatccgcagccataaagcgtgctaaaatatgcggttgcccgaaatagcctaatccccaagccgcaagacttaataaaccaagtggtgtggtagaagtaaataaatccgtgaaatctttatttacggcagcctcagcttgttctagtactgcggaaaattgagcggtatcggcgaaactcaataacacaaaaacaggggttaaaattaatgcaaaaatcattaatgtggcttgaatggtatctgtccagcttaccgcgaggaaacctccgatgaacgtgtaagcaatggttgccgctgcgccgtaccaaagtgcggtggaatattccacagaaaatatattttggaataattttgcgccagccacgacaccagaagcacaataaatagtaaaaaacactaaaataatagtggcagaaacaagttttaataatttgtgtgatgaaccaaaacgattgtgaaaatattctgggagagtgagcgcattattatttaattctgtataaacacgcaaacgaccagccactaaaagccagttaaaataagccccgatagttaaaccaatagcaatccagccttcaactaagcctgataaatataccgcaccaggtaagcccattaaaagccaaccagacatatctgaagcaccagcagacattgcagtaacaaaactgcctaaacgacgtccaccgagaatgtaatctgataaattattcgtgtaataataggcgagtacgccaatcagcaacatcccgaaaatataaatagtaaaagtaataagagttgggtcgaatccaaacattttataagtccaaaatgggttaaaaatttcagaaagggtgcattttaccttatttcgggctattattctatttagactaaatatttgatgaaatttaagaaattaggaatataaaatggatgctgtcgagttattgatgaacgtaacgcctaacgaaacacgcattgcgctagtcgaaacaggaatgttgcgcgaagtgcatattgaacgccaagctaaacgaggaattgtcggaaatatttataaaggtcgtgtcactcgagtgttaccaggaatgcagtcggcttttgttgatattggtttggaaaaatcggcttttttacacgctgcggacattgtatcccatacagaatgtgtagatgaaaatgaacaaaagcaatttaaagttaagagcatttcagaattagtacgagaagggcaggatattgttgtacaagtggtgaaagatccccttggtacaaaaggcgcgcgtttaaccacagacatcacattgccatcacgttatcttgtttttatgccagaaaatagccacgtaggcgtttcacaacgtattgaaagcgaagaagagcgcgcccgtttaaaagcgttggttgaacctttttgtgatgaactcggcggttttattattcgtaccgccacagaaggggcaagcgaagaagaattacgtcaagacgctgaatttttaaaacgcttatggcgtaaagttttagaacgtaaatctaaatatccaaccaaatcaaaaatttacggcgagccagcacttccgcaacgcattttgcgtgattttatcggcacaaacttagaaaaaattcgtatcgactctaaactttgctttggcgaagtaaaagagtttaccgatgaatttatgcctgaattaagcgataaacttgttctttattctggcaatcaacctatctttgatgtgtacggggttgaaaatgcgatccaaacagccttagataaacgtgttaatctcaaatcgggtggctatttaattatcgagcaaacagaagcgatgaccaccattgatattaatacaggtgcatttgtggggcatcgtaatctagaagaaaccatcttcaatactaatattgaagcaactaaagccattgcgcagcaattacaactacgtaatcttggtggcataatcattattgattttattgatatgcaaacagatgaacatcgcaatcgagtattgcaatctttatgtgatgcactttctaaagatcgtatgaaaactaatgtgaatggctttacgcaattaggccttgtagaaatgactcgtaaaagaacccgcgaaagccttgaacacgtgctatgcgatgaatgtccaacttgtcatggacgtggtcgggtgaaaactgttgagacagtttgctacgaaattatgcgtgaaattattcgggtgtatcatttattcagtagtgaacaatttgttgtttatgcctcgccagcagtttccgaataccttattaatgaagaatctcacggtttactgccagaagtggaaatgtttattggaaaacgagtaaaagtaaaaacagaacagttttataaccaagaacagtttgatgtggttgtaatgtaaactctatttcaataaagtgcggtaaaaatttttgagattttcaccgcactttttatttataaaaacaatatttcctttatatcttaatctatatgatgtagaactaggtagcttttatttaatatagtgaggatataatatgtttttatataattctgtaaacaaacaacactagtcttttcttcccatcttgcacaataactacggctctctccattattggtggaatattcactaatccagctttagttgatacgcctccctccactacatcacattaaaaagcggtatcgccgtgaatgcaggcaaaaacagcaaaatttcctatcaaatgggagctggctgggtttggtaagctaaacattcaaaaaacttaccgcactttgtgcatttatacatcgccacgataatttcgtggcggtttttttatggcaagtttttacaatcttttatttaaatctagtatttctatggcaagaacaggagatgaacctttattttcccttagatttgtatagaatagccgaatatttttttattttaacgagagaaaatgatgagccatacagagacatctttgggtgcggaaaatacccgcactcacaattttattacccaaattattgatgaagatttagcttcgggtaaacataaaagcgttcatacccgttttccgccagagccgaatggctatttgcatattggtcacgcaaagtctatttgcttgaattttggcttggcaaaagaataccaaggtttatgtaacctacgttttgacgataccaatccagtaaaagaagacgtggaatatgtagattctatcaaagcggatgtggaatggttaggttttaaatgggagggcgaaccgcgttatgcatctgattacttcgatgcgctttatggctatgcgattgaattgattaaaaaaggcttggcgtatgtggatgagctttctccagaagaaatgcgtgaatatcgtggtaccttaaccgaacctggtaaaaacagcccatatcgtgaccgcactattgaagaaaacttagcgttatttgaaaaaatgaagaacggtgagtttgcagaggggaaagcaagtttacgtgcaaaaattgatatggcatcgccatttatggtcatgcgtgatccagtaatttatcgtattaaattcgctagccatcaccaaacaggtgacaaatggtgtatttacccaatgtacgatttcactcactgtatctctgatgcaatcgaacgtatcactcattcaatctgtacattagaattccaagataaccgtcgtttatatgattgggtgttggaaaatatcagtattgaacgtccattaccgcatcaatatgaattttcacgtttaaatttagaaggcacattgacgtctaaacgtaagttattgaaattagtaaacgacggtattgtagatggttggaatgatcctcgcatgccaaccatttcaggtttacgccgtcgtggttatacaccagcttcgttacgtgaattttgtcgccgtattggtgtgactaaacaagataacgtggtggaatattctgcacttgaagcctgcattcgtgaggatttaaatgaaaatgcaccacgcgcaatggcagtgattgagcctgttcgtgtggtgattgaaaactttgaaagcgaagcggttttaactgccccaaatcatccaaatcgtcctgaattaggggagcgtcaattgccgtttacgaaagaactttatattgatcgagctgacttccgtgaagaagcgaacaaacaatataaacgtttagtattaggtaaagaagtgcgtttgcgtaacgcttatgtgattaaagcggaacgtgtggaaaaaaatgaaagtggcgaaatcaccacgattttctgtacttacgatcctgaaactttaggtaaaaatccatcagatggacgtaaagtgaaaggtgtcattcattgggtttctgcggttaataatcatccagctgaattccgtttgtatgatcgcttatttactgtgccaaatccaggggctgaagatgatatcgaaagcgtgttaaacccaaattctttagtgataaaacaaggttttgtagagcaaagcctcgcaaatgcagaagcagagaaaggctaccaatttgaacgtgagggttatttctgtgcagatagtaaagatagccgacctgaacatttggtatttaacttaacagtaagcttaaaagaaggcttctaattttaatcaaccaagtgcggtcaaaacaaacgtgattttgaccgcactttttatttgtatcaactatgcaatccaatatgcaacttgaacccaatttctggcaaaccaaatccctgctagaaatgactgaatctgaatgggaagccttatgtgatggctgcggcaaatgctgttatcgcaaatatattcaagggcgaggtaaacgccaaaaactctattacacccgaattgcttgtaatcttttagatctggaaacaggaaagtgcggtaattattcagagcgttttaacattgaaaccgattgcaccaaactcaccaaaaagaatttacctgattttcattggctgcctgatacttgtgcctatcgtttgctttatgaaggaaaaacgctacccgaatggcatccgcttatttctggctctccccattctgtaaaaaatgcggatattttgattaaaaatggtatccacgaacgagatgtgattgattggtttgagtttattattgacgaagatcacacttttaaataaagccagttgtcatcactttcagcttagctataatccctaacaatagttatacagttgtgatgtggtgtctatgcaaatctcggattctctcaaacaaaaagcagaaaaatgcggtatcgcgctttctcactatgatattgatggacatcttattttcgcggatgaaaagacggtttcaacttttgttgagcttttgcagcctccgccaaaagcgaaaggacagtttgacgatgtactggctgcatttgaaaatgaaccgattgactatcgactcaatcgtctagatctcccaccatctgcggaatatcgttatcagctgattgatgaatctaatgctattctgttagaaaaaatactttcaaatttatccgcactttctttgcctccacttccttttggctattatcaattatctattttttccgatactgaacagtaccgcattcgtttacttatttctcctaaaacagcttttcaaccatccgtattaaaaaataaaaaagtgtggggcgtgaatgtgcaactttacagtttacgctcagaacaaaactgggggattggcgattttggcgatttggcctatttgattgaacaaagtgcaaaacaaggggcggattatgtgggaattaatccattacatttgccatatcctgctgtgccaaactgggctagtccttatagttcatcttcccgtcgttggttgaatttcttatatttggacattcctgatttacccgaatttaagcgttgccgttcagtacaaaattggtttaagcgtgaggatattcaagcaaaaattgctgctttacgtgaaagtgattgcgtcgattattcttcaatattggctttaaaattaaccgcacttgagtccctgtttgatttctttcagcgtagtcaatccgctgaaattgtgacacgtcgaaaaatctttgctgattatttaaaaaacaaaggtgaacctttgttgttacagggtttatttaatgtcttggatttgcaagaacacgccgatcatcaagcagaagaaaataccattggttggcttggctggcgtaaggaatggcaacatttaagtacggcaaaaagaaaagccttattaaaaacacgccatgagaaaatccaattttttgcttggttgcaatggcttacagaagaacaactttccgcattacaaaatctttgtaaacagtctggtatggagttggggatttatggcgatttagccgtaaatagttctcgtggcagtgctgatgtatggagcgatcctgatttatattgtgtaaatgcctctattggtgcgccgcccgatccgttaggccctgtaggacaaaattggaatttgccaccttataatccaaccgtgctaaaagcacgtggctttgcaccatttatcgatatgctacgtgccaatatgcaatatttcggtgtgcttcgcatcgatcatgttatgggcttatttcgtttgtggtggattccaaaaggaaaaactgcggctgacggtgcttatgtgcattatccttttgatgaattaatggctattcttgccattgaaagtgtacgcaatgaatgtttgattatcggtgaagatctcggcactgtgcctgatgaagtgcggtggaaattaaacgagtttcaaattttctcttattttgtgttgtatttcgcccaacgaaatggcgaatttcctcgtatatctgattatcctcgaaatgcttatgccactattggtacacatgatgttccctcattacaaagtttttggcattgtcgtgatttagaattatttaatcaactcggtattctgaatggggaagtgctcaagcaaaaatatgatcaacgtgtcatggataaacaagccttattaaatagtttgcatcgtgataattatttaccgacgcattatgagggcgatgcgctttctatggcgatgcacgattatttaaatcgaatgatccattattatttagcggaaagtaacagccgattgattggtgtgcaattagaaaatttacttagccaagaaatcagttttaatttaccgagcacctcaaatgaatacccaaactggtgcaagaaacttgctcaaccgttagcgtttatttttagcaatgaagctttaaaaacgttctttgtgcaaattaaccaagggcgaaatgtataaggagtaaatatgacaaccgcagtaacacaagcaattattgatggtttttttgatgcgagcaatggtgatccttttgctacgcttggtatgcacgaaaccgagcaaggaattgaaatccgtacgttattgccagatgccaatcgaatggtggtgattgagcgtgaaagtggtaaagaaataacggaactggattgtgtcgatgagcgtggattttttgttggtgttattccaaattgtcgtcaattttttgcttatcaattacaggttttttggggtaatgaagcacaaattatcgaagatccttatcgttttcatccaatgattgacgatttagaacaatggctacttgctgaaggttcgatgcttcgcccctatgaagtgcttggtgcgcattttatggaatgtgatggtgtgagcggggtgaatttccgcttgtgggcacctaatgcaagacgagtttctattgtaggcgatttcaactattgggatggtcgccgtcatcctatgcgttttcatataaaaagtggtgtttgggagctctttttaccaaaagccagtttaggacagctctataagtttgaattaattgattgccatggcaatcttcgtttgaaggccgatccttatgcctttagttcgcaacttcgccctgatacagcttcgcaagtcagtgccttgccaaatgtagtggaaatgactgaagcacgcaaaaaagcaaaccaaggcaaccaaccaatttctatttatgaagtgcatttaggatcttggcgtcgtaatttagaaaacaatttttggctagattacgatcaaattgctgatgaattaattccttatgtaaaagagatgggcttcacccatatagaatttttaccgctttctgaatttccatttgatggttcttggggctatcaaccacttggactttattcgccaaccagtcgttttggctcacctgaggcatttcgccgtttagtaaaacgtgctcacgaagctggcatcaacgtgattttagattgggtgccaggacatttcccaagtgatacgcatggtttagttgcatttgatggcacagccttgtatgaacatgaagaccctcgtgaaggctatcatcaagattggaataccttgatttataactatgggcgtaatgaggtcaagaatttcttatccagtaatgcactgtattggcttgaacgttttggcgtagatggtattcgcgtggatgctgtggcttccatgatttaccgtgattatagccgtgtggagggcgagtggattccaaaccaatacggcggacgtgaaaacttagaagccattgaatttttaaaacacaccaactggaaaattcacagtgaaatggcgggtgcaatttctattgcggaggaatctacctcttttgcaggcgtaacccacccaagcgaaaatggtggattgggctttaattttaaatggaatatgggctggatgaacgacacgcttgcttatatgaagctcgatccgatttaccgccaatatcatcacaacaaaatgacctttggaatggtatatcaatacagcgaaaattttgttctaccactttctcacgatgaagtggttcacggtaaatattcacttcttggcaagatgccgggcgatacatggcaaaaattcgctaacttgcgtgcatattacggttatatgtggggctacccaggcaaaaaattactctttatggggaatgaatttgctcaaggcagagaatggaattacgaagaaagtttggactggttcttgcttgatgaaaatattggcggaggctggcacaaaggcgtattgaagctggttaaagacctcaatcaaatttatcaaaaaaatcgaccgctctttgagctcgacaactccccagagggtttcgattggcttgtcgttgatgatgcggcaaattccgtgttcgcctttgaacgtcgcagttcaaacggagaacgtattattgtcgtcagtaactttacccctgtgcctcgccacgactaccgcatcggcgtgaatattgtgggcgaatatgaagaaattttgaataccgattcaatgtactatcaaggctcaaatgtgggcaattttggttgtgtcgcaagtgaaaatatcgaaagccacggacgagaaaattcgatttcagtgtccattccgccgttagcaacagtttatttgagattgaaggcgaaataatccgaatagataaattgtaggggcgaattacattcgccctgataaaccaccgatgtttttgggcaaatgtaatttgcccctacaaaagcgataaaaatatgttcaaaatctacaacaatggcaatcctattccaatgggatactcacaagcggtcgaaaacaacgtgcaaattaccaatttcgtcctgttttccgctgcggcaataggcgtagaactttgcctttttgacgaacaaaatcaagaaacacgcttgccgatggtgcgtactgaaaatgtgtggcatttggcggtaactggcgtgaaaactggtacggaatatggatttcgtattcacggcgaatatgccaacccgaataaattaatgctcgatccctatgcgaaagccgtgaatggtaaacctgatttaagtagcgaagaaagttgttcttggttcttgctttcggataatcgcgacaacgcgcatcttgccccaagagcggttgtgatttcggaagattttaattgggaaaatgatactttatccaatacgccttgggctgaaaccattgtgtatgaattacacgttaaagggtttagccagttaaacgagaaaatccctgcggcgttgcgtggtacttatactggattagcacatcctgtgaatttggcgtatttgaaagaattaggcgtaactgcggtggagttgctgcctgtaaatttccatataaatgaaccgcacttacaggcacgaggcttacaaaattattggggatacaatcccttagcgatgtttgcggtggaacctaaatatgcggcaacaaataatccattagctgaatttaaagcgatggtaaaggcgtttcacaatgcgggcattgaagttattttagatgtggtgtttaaccattccgcagaatcagagcaaacttacccaacattcagccagcgtggtattgatgatcaaacttactattggcgcaacgatcaagggcgttatatcaattggacaggctgcggcaatatgctcaatttatcctctgatgtagggcgaaagtgggtggtggattgcctgcgttattgggtggagcaatgccacattgatggattccgttttgatttagcctcggtgcttgggcgtgatacacctgatttcaactcgtcagctcagctttttactgacataaaaaatgagccaagtttacaaaatattaaattgattgccgagccttgggatattggacattacggttatcaagtcggcaatttcccaagttattttgccgaatggaacgaccgattccgtgatgatctctgccgtttctggctatggaaaagtggcgaaattggtgcatttgcagaacgttttgcaggttctagcgatttatttaagaaaaatgaccgcttgccacatactacacttaattttattaccgctcacgatggttttacgcttaaagatttagtgagttacaaccaaaaacataatgaagcgaacggcgaagaaaatcacgacggcagaaacgaaaattacagttacaaccacggagtagaaggttctacagaatccctttctgaaccgcaaaaaagtgcggtggaaaataaccgcacttttgcacaaagtggattattaatgagtttattgctggcgaatggcgcacctatgcttttggcgggcgatgagttcggcaacactcaatatggtaacaataatgcttattgccaagataacgagattacttggctgaaatgggcaaattttaacgaagaattatttgaactgaccaaacaaacgattgcacttcgtaagcaaattggcagtttaaaccgagatcaatggtggtcggatgagaatgtgcaatggcttaacattgcaggcgaaccgatgacagttgaagattggcaaaatcaacaaaccaaagcattacaggtggttttagacaatcgttggcttttgttgattaatgccaaagccgaaggccaggtgtttcacttgcctaatgggaaatggaagccccaaatcggcacacataatgtaacccttgaagaacaagccgaacttagttcaatgggcttttgtatgctgaatgacgaataacaataagactatggagatccttatgaaatctggcgaccttaacaaatatgatttagttaaaaacactttggtgcttgttctcgcaggtggacgaggttcacgtttacacgaattgacagataaacgtgcaaaacctgcgctttattttggtggtaatcgtcgcattatcgattttgcactttctaattgtattaattcagatttaaaccgaattggggtcgtgactcaatatgcggcacactccttgcttcgtcatttgcaaacaggctggtctttcttaccgcaagagcgtggcgaatttattgatatgttgccagctcgtcagcaaattgacgattctacttggtatcgtggcacggcggatgcggtatatcaaaatatggctattattaaaaatcactatcgcccgaaatatattttgatcttagcgggcgaccatatttacaaacaagattacagcgtgatgttaatggatcacgtcaatagtggggcaaaatgtactgttggttgcattgaagtgccccgttctgaagcacacgaatttggcgtaatggctgtaaacgaaaacttgaaagtaaaagctttcgtggaaaaaccaaaagatccgccagcaatggtgggtaaacctgatgtttcgcttgcctcaatggggatttatgtgtttgatgcggattatctttataaaatgcttgagcaggaagttaataccccgcaaactagccatgatttcggtaaagatgtattgccaaaatgtttagaagaaggcgcgctttatgctcacccatttagccgttcttgcatgggacgcaacaccgagggcgaaatttactggcgtgatgtagggacacttgatagcttctggcaatctaatatcgacttagtctctgaaaatccacaattagatatttacgatcaaagctggccaattcgtggtaatcctattcaggcttatccatcaaaatttttctacaaacactccaatgtgcatcctgtagataactcacttatcggcggcggttgtgtgattaccgatgcttcgatcagcaattctgtattattcgaccacattaaaattgatgcattttcaaaagtggatcactgcgtggtgctaccacaagttaaaatcggtaaaaattgcgtgttgaaaaattgtattatcgaccgagaatgtgaaattcctgatggtatgcaaattggtgtagatatggaagaagataaaaaacgcttccgtattagctcaacaggtaaagtgattcttgtgacctcaaaaatgttaaagaaacttgagggacacgagattggcgaagaaggacatttagattagttaggaaaagtgcggtcaattttgaccgcactttctaccccctctcttttctaaagagaggagttgatcgagcgttatttacatttacagggaaaacaaatattcaatgaaaatcttacacgtttgctcggaactctatccgctcttaaaaacaggtgggcttgccgatgttttaggggcattaccccaagcacagaaccaaatcgggctagatgcccgcgttttattgcctgcttatccagcgatttctgcaggtatttctaatacacaaattgttgccgaatttgacaacttcgctgggcacgtggtgttgcgttatggagaatataatgatatcgggatctatttgattgacgcaccgcacttatacggtcgcgaaggcaatccttatcacgatgcctattacaacgactacggcgacaactacaaacgttttgccttgctcggttgggtgggggcagaattagccacaggtttagatagctggtggcgtgcagaagtggtacacgcccacgattggcacgcaggtttgtgtgcagcatatctgttcaacaaaggtcgccctgcgaaatcggtgttcactattcataacttggcgtatcaagggcagttttcttatcatcatttatacgaaattggtttgcctgcgggaatgtttaatgtggatggtttggagttattcggacaaatttcttatttaaaatcaggcttgttctattccgatgcaagcacggcagttagcccaacttatgtccaagaaatcacgacaccagaatttgcctacggtttgcaaggcttgctttctggcttaaaagctcaagatcgtttggtggggattttaaacggcgtggacgaaaatatttggcatccgaacgtggatcaatacatcccacaccattacaagctgaaatatatggcaggtaaaaagaaaaacaaagctgaactgcaagcctatttcaatttgccacaagatgaatctgctttggcatttgtgatggttacccgtttaaccgagcaaaaaggtgttgatttattaatcgaaagtgcagacgaaatcgtcaaacaaggcgggcagttgatgattttaggttcaggtgcaccgcacttggaacaaggtattcgtgagcttgctgaacgttatccacaaaatattgcggtaaaaatcggctatgatgaagccctttcgcatttaatggtggcaggtggtgatgtgattttagtgccaagccgtttcgagccttgtggcttaacccaactttatggtttgcaatatggcacactgccacttgttcgtaaaacaggtggtttggcagatacggtggtggatagcacttcagaaagcatcaaagctcgcaccgcaacaggttttgtgtttgaaagtgcaacgcctgaagctctccgccattgcttgcaacgtgcctttgccttatggcaaaaaccgcgtgcgtgggcgatggttcgcaccgatgcaatggaacaagacttcagctggcgtaaggctgcagagcaatatagaacactttatgaacgcttgtagttttattcgtaaactttcttaacaatcacaccgcttgtgaaagaatattttgcaagggtgtgattgtgcttgttttttgcaaagataagcataaaattcgaactacttttgtaggctgtgtgaacaatattcatacacgcaaagagcggtcaaattttgattgatttttgcaaacgtgcgtgaattttgcaaattcacacaccctacgttaatcatttcttagcattctaatagaggttttacctatgataatggataactttgattctccattccaatataatcgtcctgaaatgaccgttgaagcgattaaaaaatcaatcgtttacaaacttattttcttaatcggtcgctctccacgtgaagccagccaacgcgattggctcaatgcaacactccacgctgtgcgtgatttagtaacagagggttggatcactactgcgcgtcaaactcgagcggaagattctcgccgtgtttactacctttcaatggaatttttaatcggacgtaccctttctaatgcgatgattgcagaaggcatttatggattagcacaagaagctctttctgaattaaatgtggatttagaagaggttttagaaaaagaaattgatcctggcttgggcaatggtggtttaggtcgtttagcggcgtgctttatggattctattgcgactcttggtttaccaggtatgggctacggtattcgttatgaatatggtatgttccgccaaaaaattgaaaacggtcagcaagtagaacgcccagatgcatggcttgaaaaaggggcaccttgggagtttattcgcccatctaaacgctttaccgtagaatttggtggaaacattcatttcgagggtaaaaaatgcatttggcaagataccgaaaaagtgaccgcacttgcttacgaccaaatgatcccgggttatcaaaacaattctgcagcaacattacgcttatggtcggcacacgcaggcgaagtgtttaaccttgccgacttcaaccgtggcgaacatttagccgcattagaagagcactccgcaaataaaaatttatcacgtgtactttaccctgatgattctacttggaatggtcgcgaattacgtttacgtcaagagtatttcttagtctctgcatcgcttcaagatattttacgccgtcacaaacgcgcccacaatagccttgaaaacttggcggataaagtggcgatccacttaaacgatacccacccagcgttagcaattcctgaattaatgcgaattttagtggatgatgaaggtttcgagtggaaaaaagcgtgggagatgacgcgtaacattttctcttacacctgccatactttaatgtccgaagcgttagaaacttggcctgtggaaatgatggcgaaaatcttaccgcgtcatttacagatgatttttgaaatcaatgatcatttcttagaatatgtccgcacttatgtgacaactgacaacgattttatccgccgtgtttctcttatcgaagaaggttaccaacgcaaagtgcgtatgggctggttgtctgttgtaggttcacacaaaatcaacggggttgccgaaatccattctgatttaatggtgacttcaacctttgcagattttgctcgtattttcccagaacgctttaccaacgtaacaaacggtatcacaccgcgtcgttggttagcggtggcgaacccacaattagccgcattgtttgataaatatatcggctcagaatggcgttgcgatttaagccaaatcgaaaaactcaaaccgttcacgcaagaaaaagcatttaaagaggctgttgctgacattaaatttgctaataaagtgaaattagcggaatacgtaaaacgcgaattaggggtagagcttgatccgcacgccttatttgacgtgcaagtaaaacgtattcacgaatacaaacgccaaatgttgaacgtattacatattatcgctcgctacaatgaaatgcttaccaaccctgaaaaagattggcaacctcgcgtatttattttagcaggtaaagcggcttcggcttattatgctgcgaaacaaaccattcacttaatcaatgatgtggcaaatgtaattaacaacgatgaacgcttgaaaggccgcttgaaagtggtgtttatcccgaactacagcgtaagccttgcacagttgattattcctgcagcagatatttctgagcaaatatcccttgccggcacagaggcttctggaactagtaatatgaaatttgcccttaacggtgcattgacactcggtacacttgacggtgcgaacgtagagatcttggaaaacgtgggagaagataatatctttattttcggcaacattgtggaacaagttgagcaacttcgtcgagaagggtatcgatcatttgaatactatcaaaacgatgttcaattacgcacagtcgtggatcaaattattgagggtaaattctcgccagaagaagctcaacgttatcatcaactattacaaggcttgcaatatcacgattattatcaagcttttgctgatttccgcagttatgtagaaactcaaaaagccgtagatgaaaaatacaaacaacgcgaccaatggattgaaagtactattcaaaatatcgtgaatatgggcttcttctcatctgaccgcacaattaaagagtatgcggagagaatttggaaagttgagcctgttcaattaggtgattaataataaaattaaaagcaccacaagttttttacttgtggtgtttttttatggaaagtgcggtaaatttttgagatgtttttatgtgggatttttcgtgatccctatcacaatatcttgtaaaaccacttaaaaacgttacctattttcattcaattaatgatacatttgcatccgtttgactttttgtcattttaacgatgaatagacgaaggtttgttcattaatctcatcaacccaatcatcaatcagagggaaacagtatgttaattggtgtacctagagagctgcttgagaatgagagccgtgtggcgacaacgccgaaaacggttcagcaaatattgaaattgggctttgacgtgatcgtggaacacgatgcaggttttaaagctagttttgaagatcaagcatttttagaagcgggcgcgaagatcggtacgtcggctgaaatttggcaatcggatattatcttcaaagtaaatgcaccgacagatgaagaaatcgctcaaatgaaggaaggggcaactctcgtgagctttatttggcgcatgcaaaatcctgagttaatgaaaaaactcaccgcgaagaaaattaatgtgttagcaatggatgcggtgcctcgtatttctcgtgcgcaagcattggatgcgctttcttctatggcgaatatttctggttatcgtgcggtcattgaagctgcgcatgaattcggtagcttctttactgggcaaattactgctgcaggtaaagttccaccagcaaaagtgttggttattggtgcgggtgtggctggtttggcggcaattggtgcagcaaatagccttggggcgattgttcgtgcttttgactctcgtcctgaagtgaaagagcaagttcagagtatgggcgcgagcttcttagaaattgatttcaaagaagaaggtggcagtggcgatggttatgcgaaagtgatgtcggaagaatttaaccgtcgtgcgatggagctttacgcagaacaagctaaagaagtcgatattattattactacggcagccattccgggtaaaccagctcctcgtttaatcaccaaagaaatggtggattcaatgaaaccaggttcggtgattgtggatttagcggctgcaactggcggtaactgtgaatatacgcaagcagggaaagttgttacaactgaaaaccaagtgaaagtgattggttatacagatttcccaagccgtttaccaacgcaatcttctcaactttatggcacaaacttagtcaatttattaaaacttttgtgcaaagagaaagatggcaatattaatattgattttgaagatgtggttcttcgtggtgtaaccgttgttcgtgatggggaagaaattccaccagcacaaattcaagtgtctgcacaaccaaaacaagaaaccaaagctgcaccagtggcagagaaaaaagaatctaaaccaacagatcctcgtgtgaaatacggtgtgatggcaggtgttggcgtgttattcctttggttagcttctgtggcgcccgctgcatttttatcacatttcaccgtatttgttttagcttgtgtggtgggttattacgtggtttggaatgttagccatgcacttcacacaccattaatggcagtaacaaatgcaatttcaggcattattattgtaggtgcgttattacaaattcgtcagccaacaggcaatctatttatcgatgcgttagcttttgtggcgattttggtggcaagcatcaatatttttggtggtttccgtgtcacacaacgtatgttagcaatgtttagaaaaggttaaggagcgcacaatgtctgaaggtttagtacaggctgcgtatattttagcagcattacttttcattatgagcttggcaggactttctaaacatgaaactgctaaagcgggttgttggttcggtattgttggtatgacaattgcccttatcgcaacaatttttggtcctcattctgaaggaacattttggatcattattgcgatgatcattggtggagtaatcggtgttcaacgtgcattaaaagtagaaatgactgaaatgccagaacttgtggcgattcttcacagtttcgtcggtttagcggctgtactcgttggctttaatagctatggtttacaccacgaggcgttaatgccagaaggattagatgcagcagcacaagccgcatttgtagctgaacaagcggtattaacgaatattcataatgtcgaagtctttttaggtatttttatcggtgcagtcactttcactggttctgttgtcgcatttggtaaattaagcggaaaaattaattcaaaagcattaatgttaccgcatcgccataaattaaatttagccgcacttgtggtatctgcattattgatggttgcattcttgaataatccagaaagcattttccctgtgttattaatgacagcaattgcgcttgcatttggatggcacttagtggcttcaatcggtggagcagatatgccagttgtagtatcaatgcttaactcatattctggttgggcagcggctgcagcaggttttatgttgaataatgatttgctgatcgttacaggcgcacttgttggttcttctggtgcaatcctttcttacattatgtgtaaagcgatgaaccgttcatttgtgagcgtaattgcaggtggttttggtaacgatgttcaagtttcttcaagcgaagaacaaggcgaacaccgtgaaactacagcggaagaagtggctgaattgttgaaaaatgcaagttctgtgattatcacgccgggatatggtatggctgttgcacaagcacaatatccagtcgctgatattacggcaaaattgcgtgaacgtggtgtgaacgttcgttttggtattcaccctgttgcaggacgtttaccgggccacatgaacgtgcttttagctgaagcgaaagtaccttacgatgtcgtacttgaaatggatgaaatcaatgatgatttcgctgataccgatgtggtattggttataggtgcgaacgatacggtaaacccagcggcgatggaagatccaaatagcccaatcgcgggaatgcctgtgttagaagtatggaaagcacaaaatgtgattgtgttcaaacgttcaatggcagtgggttacgctggcgtacaaaacccattattcttcaaagagaatacgcaaatgctctttggtgatgcaaaagatcgcgttgaagatatcttaaaagcattataaaaaacacgcataaaaataaccgcacttgggattatctaagtgcggtatttttttatgacgtttagcgactatcttcaggattttccaaaatttctgaacacaagcctaagccagataaaaattcaataaatgcccgtacttttattggtaaatgtcttctgtttggatagaccacatgaatttctaatttttgttgtttatattctggcaatatttcaataagctcgcctttttcaaaggctctacctaaaataaattttggtaaattagcaatacctagtcccgcttttgccatatttaataaggcaaaaccgctattacttactactttggattggattttgaaacgttgggtttgatttatacgtgaaccaacccaatttacctgattcattgcatttttataaagtaagccattgtgatgttctaaatcatcaggcgtttgtggaataccattcgtttcaagataattaggcgacgctgcaaaatgaacagtagtagttcctattttacgtgaaaccaacgagctatcttccatataaccaatacgaagagcaagatcatagccttcggataataaatcgattttcttatcattaaattcaacttcaatatgcaaatgaggatgcttagccataaaagtgggtaaatttggtgcaataaaaagtaaaccaaaatcacgaggaacggaaatcagtaaatttccttgtaatgaactggtaagctgagtaatgctggaatctgcttcatctaaatcaagcaaaatgccttgacagcgttgataatacatcattccagcttcggtaggcataatttttctggtggtacgttgtaacaatcgtgtttttaaatgttcttctaattgtgaaactaatttgcttgccatcgccacagaaatattttgttgctttgctgccaatgtaaaactttgggtttcaatgactttgcagaaaatagaaatcgcgttgagtttatccatttatagaccttttttgaaaaaatgcttgattttgccaacataactttgcactataccgccaattttacaaaattctagtaatattaggtaatcaaatgagtaaatccttggtgattgtggagtcgccagcaaaagcaaaaactattaataagtatttaggtagccaatatgtcgtgaaatcgagcgtgggacatattcgtgatttgccgacggttggttctagtacaggtgaaaaagctaaaccaatttcaaccaaaggtatggatgccgaagaaaaggcaaaaattaaggcagaaaaggaacgtaacgccttagttaaacgtatggggattgatccttatcacgattggaaagcaaattatcagattctgcctggtaaagaaaaagtggtttccgaattaaagtcgcttgctaaaaaagcagatcacatttatctcgcaaccgacttggatagagaaggggaagcgattgcgtggcatttacgtgaagtgattggtggtaacgatgatcgttttagtcgcgtggtgtttaacgaaatcactaaaaatgccattaaacaggcttttgaaaagcctgaacaattaaatatggatcgtgttaatgctcaacaaactcgtcgttttttagatagagtagtgggctttatggtgtcgccattactttggaaaaaagtcgctcgcgggctttctgctggtcgagttcaatcggttgcggttaaattactagtagaacgcgagcgtgaaattaaagcgttccagcctgaagaatattgggaagttgccgtccttacgaataatcaaaataaacaagctatacgcttggatgttacggattataaaggcaagaaatttgatccaaaaaatcaaaaagaagcacaaagtgcggtagattttctgaatgtttcagattacgttgtcacagatttggaaactaagccaacaagttctcgccctcgagcaccatttattacatcaacacttcaacaaactgcaagtactcgcttgggatttggcgttaagaagacaatgatgttagcccaacgtttatatgaagcgggttacattacttatatgcgtacggattcaaccaatttgagtcaagatgcgcttaatatggcgcgtagctatattgaaaatcattttggtgcacaatatttaccagaaaaaccaaatttctattctagtaaagaaaatgcgcaagaggctcatgaggctattcgtccatcagatattcgagcattgcctgaatctttagagggaatggaaaaagatgcggtgcgcctttatgatttaatttggcgtcaattcttagcatgtcaaatgccgcctgcacaatatgatagcagtacattgactgtttcagctggcgattataccttgaaagcaaagggcagaattttacgttttgatggttggacaaaagtattgccacaaataggcaaaaatcctgaatatcaagaattgccttcagttactgtttcagaaaaacttgctttaaaagaagtgcaaccaactcaacactttactaaaccacctgctcgttttactgaagcggctttagtaaaagaattggaaaaacgtggtattggccgaccttccacttatgcggcaattatttccactattcaagaacgtggttatgttcgtactgaaaatcgccgtttctatgcagaaaagatgggcgaaattgtgactgatcgcctcaatgagtcttttggtgaattaatgaattacgatttcaccgcgaatatggaagatactttagataaaattgcctctggttcagtaaattggaaaactgaattgaatcaattctttaaggatttttctagccagctttctaaagctgaattagatgaacttgaaggtggtatgcgcccgaataatctcgtggaaaccgatattaaatgcccaacttgtgacagaaaaatggccattcgcacggcaagtacgggggtgtttttaggatgctcgggttatgcattgccgccaaaagagcggtgtaaaacgacgattaatttaattcctgaagcagaattattgaatgttttagatgaatcttcagaaactaaagcattaatggatcgtaaacgttgtacaaaatgtggaacggcaatggacagctatgtaattgatgcccatcgtaaaatccatatttgcggtaataatccaaattgtgatggatatttggttgaagaaggttcattcaaaattaaaggttatgatggccctgttgttgagtgtgataaatgtggtgcggatatgcatctaaaacttggtcgttttggcaagtatatgggatgtacaaattgtgataacacgcgcaaaattttgaaaaatggcgaggtcgcaccaccgaaagaagaaccagtacatttccctgagttaaaatgcgaaaaatctgatgcatattttgtattgcgtgatggtgcgagtggtgtatttatgtcagcccataacttccctaaatcacgcgaaacacgcccagttaaaatcgctgaactagtgcaatatcgcgagcgtttacctgaaaaattagcttatttagccgatgctccacaaaaagacccagaagagaatgaagcgattgttcgttttagtcgtaaagagaagaaacaatatgtgacttctgaaaaagagggaaaagcgactaaatggattgttgatttcaccaatggaaaatgggttgaacgaaagaaataagaaaaaaagtgcggtaaatcaccgcactttttttgtaataaatcttcttatgttttgtaggttattgaggattaaagggctgctacaatttcattaattttattttttgcggacgcttgggctttttcaattgcttctgatccgaatccaatgccttgtgcataaacaaattgcacatctgtgataccgataaaacctaaaattgatttcatatattgtgtcactagattttcttcatcatacaatccaccaaatgcacataacacaatggcttttttgccttttaataacccttccggtccatttgccgtatattggaaagtaacgtgcggacgtgcgataaaatcaaaatagctttttaattgtgttggaacgtttaaattatacatcggcgcaccaattatcaatgtttgtgcgttttttaattcttcgattagtttatcagacaacgccagaagttgtttttcttctgttgtttttggttctccacgcacagcaattgcagctgcggtatcaaaatatggaagaggttgttgggataaatcgcgtactacaatgttattaccttgtaatttttcgataacataatcagctaattgattagtttgcgagttatttcctgaaatgctagattttaatactaatacgttgctcatttttattccttaactgggtatttaaaagtgcggttattctagcctttatttttaagagataaagcctttagtcagaaaaacattatttcctttttgtaaaatatgggcatttatttaacaatacttcaagaaagtgatagaattcgccacgcattttttgcctaatttcgctcgttcaatggtaggaatgaagccaagtagggcaaaagtgcggttaatttttatagaattttaaatgaacacgtcacctttcgtatgggtgaccactgtataaggaaaaaacaatgccaattattactttacctgacggttcccaacgtcaattcgatcgtcctgtttctgttcttgaagtcgcacaagatattggtgcgggtcttgctaaagccactatcgcaggccgtgtaaacggagaacgtcgcgatgcgtgcgatgttatcgagcaagatgcaacgttagaaattattactgcaaaagatgaagacggtttagagattatccgccattcttgcgctcacttgctcggacacgctattaaacaattattcccagatgtaaaaatggcaattggtccaactattgaaaacggattctattatgatgtagatttagatcgctctttaacccaagaagatattgatgcaatcgaaaaacgtatgttggaattggcaaaaacaaattatgacgtcgtgaaaaaacgtgttacttggcaagaagcgcgtgatacctttgaaaaacgcggcgagccatacaaaatggcaattttagatgaaaacattgaacgtactgcaacgcctgcgttatatcatcacttagaatatattgatatgtgccgtggaccacatgtgccaaatatgcgtttctgtcagcatttcaaattacaaaaagtcgctggtgcgtactggcgtggcgacagtaaaaacaaaatgttacaacgtatctatggtacagcttgggcggataaaaaacaacttgctaaatatttaacacgcttagaagaagcggcaaaacgtgaccaccgtaaaattggtaaagcattagatttatatcatatgcaagaagaagcaccaggtatggtgttctggcacaatgatggctggacaattttccgtgagcttgaaaccttcgtgcgtactaaattaaaacaatacgattatcaagaagtaaaaggcccatttatgatggatcgcgtattgtgggaaaaaacaggtcactggcaaaattacgcagatttaatgttcacaactcaatctgaaaaccgtgaatacgcaattaaaccgatgaactgcccaggccacgttcaaatttttaatcaaggtttaaaatcttaccgtgatttaccaatccgtatggcggaatttggttcttgccatcgtaatgaaccatcaggttctttacacggtttaatgcgtgtgcgtggctttactcaagatgatgctcacattttctgtactgaagatcaaattgagagcgaagtaactagctgtatcaaaatggtgtacgacatttatagcacctttggcttcactaatatcgcagtaaaactttctactcgccctgaaaatcgtatcggttcagatgaaatgtgggatcgtgcggaagcaggtcttgctgcagccttagcacacaacggtcttgaatatgaaattcaagaaggtgaaggcgcattctatggtccaaaaattgagtttgcactacgagattgtttaggtcgtgaatggcaatgtggtaccgtgcaattagacttcgcattaccgggtcgtttagatgcaacttatgtggctgaagataatagccgtaaaacccctgttatgattcaccgtgcgattttaggttctattgagcgtttcattggtattattactgaagaatatgcaggtttcttccctgtatggttagcaccaacccaagcagttgtaataaatatcactgatagccaagctgactatgtacaaaaagtcgcaaaacaactttctgatgtaggtttacgcgtgaaaacggatttgcgtaacgaaaaagtgggcttcaaaattcgtgagcatactttacgccgtgtgccttatatgctcgtttgtggtgataaagaaatcgcagaaggcaaagtggcagtacgtacccgtaaaggtgctgatttaggcacatttactgtggaagaatttgcggaaatcttgaaaaatcaagtaagaagtcgtgaattaacgttattgaatgaagagtaatacttttcgaaaataaccaatataatttattgtttcaacagtgattttaatttaacagtgatcgtttaagcgatcaccgttatttttatctgtttcagatctgttgagatttcatttattttctaataagcagctgcttttaatatgctgacaaatctgcctgatttttttagggctttttgcgccaacgcatctattgtggcttttgtcgctaactgatctaaatgttgataggtataaatggcatctggattatcttgttgccagtaactttcttcaataattgaagcaattgaaactaaagaatcaaattcacgtcgaatctgagtatgttgttccgctagttttttacgtaataagttttcatcaatgccattttttataatgtcatctagtacctgatttgtaagatgcgtaagttcctctacgcgcttagggtcgcaactaaattcaattttcccctcaatttgtggtgcataaacatcttgcataaaccaactatttacagaataaataccagaaactttttcacgtagaattaagcgtaatttttcttgcacaatatccgcaagaatattgaataaatatttttgttccgctcgccaagtattatctgcggtaaggtatatttctacatcagctctcggttctttcaagccattcatcataaatgattgagttggtgtatgaataatagttgggacaagatggcgtatctgagtttttgattcaatagaagctaaataacgttctgccaatttctttacttgattaagttcaatatcaccaataataaaataggtaaaatctgttttatctaaaatataacgttgataagcgttacttaattggtttttatcaaatgctaattgctgtgcttgtttttgagtatagacggtttcaatatttggaaaacgtagttttgaaacggcttgcataaattgtgtttctaaatcaatctgtttgaaataatcacgggtttcacgtcgatatttttctaaggcaagatcggatataggagaagaacgtaattttaagcggaacaatgtcagtaaattttccaaatccttaggtttagatacaccagtaaagccttgtttatcatcatcaatcacagttgcaatcaccaatggatcgtgcgaaaaaatttgattaaccgcagaaagagaaagttctccaacacctgtttcatcaactacactaacggcagcacgtaataagtgatagtccttatctgggatagaacgtaaaccaccttgagtaacagcacgaaaatgtacttgatttggagttttgtcactatagtgatagatcaatttacttccattacttaaacgaaattcataaatatcgccgcgatcccaatatttttcttgagaaagtgagcctgtattaaatgttaagtgcggtaatttttcgatttgttttttttcatcccattggtgttgttgcatttccattgcattgttccaacgagtttctatttctgctacatcaaaaggcaaggctttttgtggcaaaggttgagtgattaataataattttgcttttaatgctaaggtttgatttaacgtgcgttgtaaatcagctaatgtaatttgagataaaaaacgtttattgagttcataacgatcatttacgctcaataccacttgcttatttgccacagaagtaatgagatcatcggcaatttttaagctaccagaacgaatatttaattgtttttcattgagttgagttaagcgtttaatttcgccgtttaattcattttgagtaaaaccttgttgttttatactggcaataaaggcaaataatttatctatcgtttttgaatattgtgtatctataagctggagagaaaaaatgctttgtagtgtttctttacctaaatgagtgcgataaaaatttgcagaatctacgccattttctgttttcttttcccattgctgtaaacgtaagttaagtaatcgagtggtaatttgctgaattaattcttgtttataactcgctaatgtattggtttcaattgtattttcaaaaaaacttaattcaatactaggaattgttgtgccttgttctgaaatagaatctaatcgccatttgttgataagaggaatattaaaatcaattttttccaatgttgttttagtaattgggttttcttgagataggttttgttttaatagttttactacttgttttgtatcaatatcgcctacaataattactgacatattatctggtcgataccatttgtggtaaaaatcagcgacgcgtttagctgaaattgttttaataatatccatatctccaataggatcacgcaacacataacgagaacccgccatttcaatagcacttttcttattgccaatacgtaacattgggcttaaacgtctccgccattcttcttgtactacgccacgttcgccatccacatctttaggcaaaaaagtaatattattcatccattcattgatgacatcaaaagccaattctaatttttgctgattgttgctatctaaatttaaagtatagactgtattttcaaaatcggtaaaagcattaatatctcgtgcaaacttcattccaagtttttctaacgcattaataatttgattttctggatatttctttgagccattaaatgccatatgttcaactaaatgagcaatgcctttctgatcgtcatcttcatgcattgaccctgcattgatcactaatcgaatataaacgcgttctttgggttcagtattttttaatacaaagtattgcagaccatttgatagtttaccgtgctgaatatttggatcaaaaggtaaattattattgggcgatagttccaatgattgacaagcaattagtgaaaagataagtaaaaaaagtgcggttgtttttttcattattttacctagaaaaaagaaaactctacgctaagtaaaaataagcgtagagtagggctggtggatgtttcaaagcccacaagccctatacattgaagataattagaattgatagccaacttctagccaaaactcacgcccaggtgtataaacaccatattcatcgctggtggaaatagtagtgactttatttttacgtgttttattgagcacatttaaaatatcaacttgcatataaacgctatgtttacctagaatggttggttgccaacgaatgctactatcccattgtgtatgtctgccatagtgatagctacggaagcgtgaaatgccatcaccgttatcgccatcaagttcctcatagctacgaattggggctttcatatacactttattagaccaagtgatattgtaatctggtatcgtcatatcaatacctaaacgagcaatccaatcttctgtactgctattaacttgttgtagcatttgactacgagtcattaattttccgtctaaatagacgggttcatttggattaaattcattacttacatctgctcgttttgtatttagccaatcaaaaccaagtgacgtagtccaataagttttacctaatttccaaggttcaatattattgagttggaaagtataaatatcaacaccaaacggacgtccattgatataactagtttttctttcaccccgtgtagactctcgtttcaatatgatacgattcttattatcacgatgaatataaccgagtttaagtgctaaattacccatattttgatcaaaacttaaacttaattcatctgcataagggctttttagggatgaaaaattttgatgctgacgtgttgaatcattattgagctttaaaataccattcgctaattttagcgaagcaaaagaacgaccgtaataacgatttaaacctagtgtaaatcctgtattatcccaaggacggtaacgtgcaacaaagcgcggggcaatattattgttttttaaataatcatcacgttcaatacgaataccaggacgcaattcaaatttattccattttattaaatcttcagcataaatagcgatattttgataactggttttaacacgaccttttgatgttgtgctatccaacaatatcatttttgttggattatttctatttgcatctaaaatcacttgaaccacttttgaatgaacatcttgtggacgatagaattgatattttgttgcctgataaattccaccaatagaaatagaatgctccgtagaagctaaataaaaaggatccattacatattcagttgaaaaatgcaaattatcttgggttaaatggctattaccatagccgcctttttcgaaattataaagtggatcccaattttcatctgacaccgatgttgtttcaacactattcgaggatgatttacgcttatcctgaaaacgatcgtatgctaaggtatttgtccagacgccagagttgaatgaatgtacccaagcaagcgttgatcccaatgcttgatgataatcgcttacgttgttatttatattttccttgaaatatttcaattccttataatttgaataacgtaaaccaaattcaatacgttctttttcttgcggtgtccaattgaaatttaataaaagattatcggaaagtcgttgatgattttgtttgtctaactgtgttttattattggcatctttatcaaagccaattaaacgattttgttcaatagatgatgttctacggctatagccaaaaaccattcctaaattatcatttagccttttttcagccaaaatattgaatgtttgtttattgtatttaggttgtaactctgccactccgacatcatctggacgtaccaacttcagtattttttgtactgagtctccagcttccatttttgcccaagaggaatttgtcgtgcgatatttaagttttatgctatcagtgccgctatattgttttgttttggcgataactgcccctcccataaatccccctaagctagcagaaatattactatcttgtacttccactttagaaagcatagtcgcatcaaaaaaataagcttgagtgtggctaattccaggtacaacttgcatagcaccgtcaaaaatactgctatcaatagcaagatcattatttatattgacattatcaacaaagtaggcggtttgatttggatcggcaccgttaattgaaatattttcaggcttgatttcaccacgttgaaaaccattttggtcgctattttcataacgaatatggggattggaacgaagataatcagtgatgttaccgtttgatgttggtgttttacttatctcatcagaagaaagcgttttaacagaagaaagcgatttattattgtcgccataaacaacgatttcgggcaatatatttttattggttgtttcaatagttttccccataacaaatggactgacaaatgttgagcagaataacaacattaatggctttttttgatacatagtatagttccctaaaataaaaatacaaataagaatgattatcattttatttttaaaatttatgaatgcaaggggaattcgacttaaaataggtatcaaataaataaaaaccgcactttaaaagtgcggttatattcaattctgtttgtatggaagaaattattctacgccaaccattacagaagttgctttgatgattgcgtatgcttctttaccaacttctaagtttaattctttaactgctgctaaagatacagtagaagaaagcacgttaccgccaccgatatcgatgtgaacgatcgcatttactgaaccgttttcgattgaaagaactttaccttttaattggtttctagcactaattttcataacatttccttgttagttagggtttaaaagagcctgtattttatcttacaaaaaacaagtcgtaaataaactaagcgtttaaaactttcagaaaattgaccgcacttttataggcattttgcaggtttcggcaagcctgctaattttgtggcttgttttgcagggccttcaggaaataagcgttgcaaataacggctattacctttatccgcaccaagcttttccgccatggcttttaccaacatacgaatggcaggggaggtgttatattcttgataaaagtctcgcacaaagtaaatcacttcccaatgtgcatcagttaattcaatactttctacctgagcaatagctcgagcgacatcttcgttccattgttggctatggagcaaataaccatctttgtcaatttcaacttcaattccattggtattcaacatattaatttacttctttaaagttaatcatttcgttgtttgaaaaatcggtttgatcttcgtcttcaaattgcattggcgtgattcgttcttcatcaaatgcggtatctccttcaatgccatcaattagttgcccatgtttgattcctttgaaattaaataatttcggatcacacatatgtgacaatgtaatgttttgcattgcgctgaacatggtttctaagcgtcctgggtattggtgatcccaagtattaagcatttcttttaccacttggcgttgaagatttggttgtgagccacataggttacaaggaataatcggaaattttttcgcgatggcatatttttcaacatctttttctttgcagtaagcaagcggacgaatcacaatttgtttgccatcgtcagaaattaatttaggtggcatcgattttattttgccgccataaaacatatttaaaaatagcgtcgctaacatatcgtctcggtgatgtcctaaagcgattttggttgcaccaagttctgtggcagtacggtataaaattccacggcgtaggcgagagcagagtgaacaagttgtttttccttctggaattttttctttcacaatgccgtaagtattttcttgtacaattttgtaatctacgccaatactttccaaatattcaggcaatacgtgttctggaaaccctggttgtttttgatcgaggttcaccgcaacaatatcaaatttaatcggtgcactttgctgtaaattcaacaaaatatcgagaagcgtataactgtctttgcctccggataaacacaccatgactttatcgccatcttcaatcatcccaaaatccgaaatagcgttgcctacgttacggcgaagacgtttttgtaatttattgaaattatagctttgttttttttcttgctgggctaactgggttaattcgctcattctgttatctttagttattcatgaaaggcacacattatacgtgaaaaataggaaaagtgcggtcaattcaaaagaagatttttaagatccgcaaaaaatcctgtataatctttccaattttttgttcaattttaacgctttgcaattcaatgattgaaacatcccaaactattcctgaactcgtctcttgggcaaaagatcgcgagttttctttaaatttacctaccgaacgcttggtttacctgctagcgattgcaatttataacaacgaacgtttagacggcgaaatgttagaagccgatcttgtggatattttccgccacacgatgaatgcttttgagcaatccaccgatgccattgcaacacgagcgaataatgcaattaatgaattagtgaaacaacgtttgttaaatcgttttagtagtgaatttactgagggcttggcgatttatcgtttaacgccattaggtgttggcgtgtctgattattacattcgtcagcgtgaattttctgcattgcgtctttcagtgcaactttccattgtggcagatgaaattcaacgcgcttctgattctgcagaagaaggcgtggagaataatgaaggtgaacattattggcgtcgtaatgtgtttgtgccattaaaatattccgttgcagagatttttgatagcatcgatctttcacaacgtattatggatgaaaaccagcaaagtattaaagatgaaattgcagagcttcttactaaagattggcaagcggcgatttcaagctgtgaacgtttattagatgaaacatcagggaatttacgtgaattgcaagatacgctaaatgcagcaggggataaacttcaagcacaattattgcgtattcaagattgtgtgattgggcgtgatgatttgtattttatcgatcagttgattacggatttgcaatccaaactagaccgtattattagctggggacaacaagccattgatttatggattggttatgaccgccatgtacataaatttattcgtactgccattgatatggataaaaatcgcgtgttttcacaacgtttacgtaattctattcatcattattttgatcatccttggttcttatggaccgctcaagccgagcgtttagttgatctacgcgatgaagaaatggtgttgcgtgaagatgatgctttaggtgaattgccagaagaattgcaatacgaatccctttctgatttacatgatcaaattgtagagcatatgcaaggcttactgattgcttatcgtgaaaataaccgtccgattgatttgagtttagtgttaaaagaacaactggaaaattatccactttctcgtcattttgatgtggctcggatcattgttgatcaagccgtacgtcttggtatggcaaatgatgatttatcgggtatttatccagattggcaagcgattaatgaacgtggcgcagaagtgcaagcgcatgtgattgataagtattgatttcgtggcttattaaaaaacgaatttataaaatgagaaattaaccatgacagatattcaagatgtaatttccccaaaactcgctgtggcgattgcaaatccaatatttccagcggtagatagtctattgcgctcaggtcgccatatcagcacggagcatttagataatcacgcatttttaatggatttccaaaatgaattggacggtttttatcgtcgctataacgtggaactaattcgtgcaccagaaggattcttctatcttcgcccgaaagcaacgacattaattgcgcgttcagtactttctgagttggaaatgcttgttggtaaagtgctttgttatctttatttaagcccagaacgtttagcccaacagggcatttttagcacgcaagaagtgtatgatgaattattaaatcttgctgatgaaggaaaattattaaaagcagttaatcagcgttcaagtggttctgacttagataaacaaaaattggcagaaaaagtacgggctgcaattggtcgtttacgtcgtttaggtatgattcaaaccgttggcgaacaaaatagtgggaaatttacgatttctgaatctgtatttcgttttggtgcagaagtgcgtagcggagatgatccattagaagcccaagctcgactcattcgtgatggggaagcggcaacaccagaatccttagcgttggaaaaacaagcgcaattaatggaaaacgatacgaaaagtgcggatgaaattgacgaagaatttgacggagaacaagaataatgtctgatgtttttgaattagaaaatgaaatcgaattagaaagcgatgaagtcattctggaaaatgaaaacgtcgaagaaatcgttgaagcacctatgccttttagcatgacgacaaataacggtgtagagcgtggtaaattccgttctttaaccttaattaactggaatggtttttttgcccgtactttcgatttagacgaattagttaccacgctttctgggggtaacggtgcagggaaatcaaccacaatggctggatttgtgaccgcattaattcccgatttaacccttttacatttccgtaatacaacagaggctggttctacaggcggttctcgcgataaaggtttacatggtaaattgcgtccaggtgtttgttacgcagtattagataccattaattcacgtcatcaacgtattcttgttggtgtgcgtctgcaacaaatggcaggtcgtgataaaaaggttgatttaaaaacgttctcaattcaagctgtcgaattatctcaaaatccaaccgcacttttcactgaaatcgtggacgaacgtcaagcacgtgtacttaatttaaacgaacttaaagataaaattgaaaacattggtgcgcaatttaaacaatatcattccatcaccgattatcacggcatgatgttcgatttaggtattattccgaaacgtttacgttcagcatcagaccgaagcaaattctataaacttatcgaagcctctttatacggcggtatttccagtgcaatcacacgctctttacgtgattatttattgccagaaaatttaggtgtgcgtaaagctttccaagatatggaaagtgcattgcgtgagaaccgtatgactttagaggcgattaaggtcacgcaatcagatcgtgatttattcaaacatttaattactgaaaccaccaattatgttgcttcggattatatgcgtaatgcgaatgaacgccgtggcaatattgaggctgcattagaatctcgtcgtgagtggtataaagcaaaagcagagcagaatttatctcaacatcgtttagttgatttaagtcgagaagcggctgaattggcagaaaatgaacggactttagaagttgatcaccaaagtgcggttgatcatcttaatttagtgttaaatgctttacgtcaccaagaaaaaatcacgcgctatcaagaagatattgcagaacttaccgagcgtttagaagaacaaaaaatggtggttgaagatgcgaatgatgcgttagaagaaagccaagcccaatttgagcaaactgaaattgaaattgacgctgtacgagcccaattagctgactatcaacaagcattagatgcccaacaaactcgcgcacttcaatatcaacaagccattgctgctcttgaaaaagcgaaaacattatgcggtttagcggatttaagtgttaaaaatgtagaagattatcacgcagagtttgaagcccatgcagaaagtttaacggaaaccgtacttgagcttgagcacaaaatgtctatttctgaagcggcaaaatctcagttcgataaagcctatcaattagtatgcaaaattgcgggtgaaatgcctcgttctgcggcgtgggaaagtgcgaaagaattattacgtgaatatccaagccaaaaattgcaggcacaacaaacgccacaacttcgcacaaaattacatgaacttgagcaacgttatgcacaacaacaaagtgcggtcaaattacttaatgattttaatcaacgtgctaatttaagtttacaaacagcagaagaattagaggattatcacgctgagcaagaagcgttaattgaagatatttcagcaagattttcagaacaagtggaaaaccgttctacgcttcgtcaaaaacgtgaaaatttaaccgcactttatgatgaaaatgcgcgtaaagcaccagcatggctgacggctcaagctgcattggaacgtttagaacaacaaagtggcgagaggtttgaacatagccaagatgtgatgaattttatgcaatcacaacttgtgaaagaacgtgaactcacgatgcagcgtgatcaacttgaacaaaaacgtttgcaattagatgaacaaatttctcgtttaagtcagccagatggttcagaagatccacgcttaaatatgttggcagaacgctttggtggagtactgctttcagagctttacgatgatgtaaccattgaagatgcaccttatttctccgcactttatgggcctgtgcgtcatgctattgttgtgcgtgatctcaatgctgtgcgtgaacaacttgcgcaattagaagattgccccgatgatttgtatttaattgaaggcgatcctaccgcatttgacgacagcgtgttatccgcacaagaacttgagctaggtgttgtcgtgcaagtttcagatcgtgaattacgctattccagattccctgaaattccgttatttgggcgtgcagcacgtgaaaaacgtttagaagaattacaaattgaacgtgatgaagtggcagaacaatatgcccaaattgcgtttgatgtacaaaaatgccaacgtttacacgaacatttcagccaatttgttgggttacatttagcccttgcgttccagccaaatccagaagagttaatgtctgagattaatcgcgaacgcaatgaaattgatcgtgaattaaaccaatttaatagcggagaacaacaattacgcattcaattagataatgcaaaagaaaaactgcagttactcaacaagttaattccacaactcaatgtattagctgatgaagatttaattgatcgtattgaagaatgtcgtgagcaattagatattgcagagcaagatgaatattttattcgtcagtatggcgtaacgttgtcacaattagagccgattgcaaatagtttacaaagtgatccagaaaattacgaaggtttaaaaaatgaattaactcaagcgattgagcgtcaaaaacaagttcaacaacgtgtatttgcgttagctgatgttgtacaacgtaaacagcattttggttatgaagatgcagggcaggctgaaacttctgaactcaatgaaaaacttcgccaacgtttagaacaaatgcaggcacagcgagatacacaacgtgagcaagttcgtcaaaaacaaagtcaatttgccgaatataatcgcgtattgattcagttacaaagttcttacgatagtaaatatcaactcttaaatgaattgattggtgaaattagcgatcttggcgtgagagctgatgatggtgctgaagaacgcacgcgtatccgtcgtgatgaattacatcaacaactttcaacaagccgtcagcgtcgttcttatgtagaaaaacaactgacattaattgaaagcgaagcggacaacttaaatcgtctaatccgcaaaactgaacgtgattacaaaactcaacgtgaattagttgtagcagcgaaagtgagttggtgtgtggttttacgtttatcacgtaattctgatatggaaaaacgcctcaatcgccgagagctcgcttatttatctgcagatgaattacgttcaatgtcagataaagcattgggtgcgttacgtacagcggtagcggataatgaatatttacgtgatagtctaagagtgtctgaagatagtcgcaaacctgaaaataaagtgcggttctttattgcggtgtatcagcatctacgtgaacgcattcgtcaagacatcattaaaacggatgatccaattgatgccattgaacaaatggagattgaactttctcgtttaacggctgaattaactggccgtgagaaaaaattggcaatcagttctgaaagtgttgcaaatattatgcgtaaaacgattcagcgtgaacaaaatcgcattcgtatgctcaaccaaggtttacaaaacattgcgtttggtcaggtgaaatctgttcgtttggtagtgaatattcgtgatacccatgccatgttgttggatgcgctttctggtcagcaaaatgaatatcaagatttattcaacgacaaccgcatcaccttctctgaagctatggcgaagctctatcaacgcatcaatccacatattgatatggggcaacgcacagcgcaaacaattggtgaagaattgttagattaccgtaattatcttgagcttgaagtggaagtattccgtggtgctgatggttggttacgtgcagaaagtggcgcactttctacgggtgaagctattggtacaggtatgtcaattctcttaatggttgttcaaagttgggaagaagaaagccgtcgaattcgtggtaaagatattgtgccttgtcgcttgttgttcttagatgaagcagcacgtttagatggtaaatctatttctaccttattcgaactttgcgaacgtttagatatgcagttacttatcgctgcgccagaaaatattagcccggaaaaaggtacaacctataaactcgtgcgtaaaatcgcaggcaaccaagagcacgtacacgttgttggtttacgcggattcggtgcgacagaataaaaaatagaagggaagtgcggttgaaaacttcggtgtttttgaccgcacttaagcctttaaggaaggaataatgaaaatctttacatcaaaaaaaggacaattatcacagctgaagcagcaaaaatttaagctggaaaaggatattcagcgtttatttgaagaaaatcttaccttattaagtggctatatttttattcgttcggaattttctattaaaaattcacgtattgataccttagcttttgatcctgaagctcaagcctttgtcattattgaatataaaagacaacaaaattctagtgtggttgatcaagggatttcttatcttaatttgatgcttgaatacaaagctgattttattgtggaatataatgaaaagcaaaaattcccacttaaaagaaatgatgtggattggtcacaatctaaggtgatttttgtttcacctgcttttaatgatttccaaattcaagccacgaattttaaagatttacctattgaattatgggaagttaatcgctttgataatgatattattacgctcaatattattaataaatcaaaatcagcaccgaatattaaagctgtttctaatgaaaagagagaagaattctcaatattaaaagaaataaaagtttatcaagaatctgatcacttaagtgataaatcagattttattcaagaactatacgaagattttaaacaaggcattttaaatttagatcctgatatcgaaattaataccagaaaactttacattgcatttaaaaaagatcgaaatattgcagatattcgtattcaacaaaagaatttaaaaatttggattaatcttccttatggagagttagacgatcctaaaaatttagccaaaaatgtatctaatactggtcactggggaaatggagattatgaaattgctgttgaaagtacccaatatcttgaatacgttatgagtttaattaaacaagccattaaggattaataaatgcacaatcttatttttgccattctttgcagcgtagcagtttcagttttgcttaaaatagcccgtaaaaaaaatatcattattgaacaagctatcgcattcaactacattacagccatcactttcagttatttcttacttaaacctgattttaaaggtttagaatttactgattacattgcacaaagcgaaaattcacccatttttttagcactaggtttattgctacctagcgtatttattattatgtcaaaagcagtggagtttgctggaattatacgttcagatgcagcgcaacgtctttcgttatttcttcccattttagcagcgtttttaatttttcatgaaacactaagccaatctaaaatcattggcgttgtattagcctttattggtttgttttgtttattaactaagccaactcaagggcaaagtgcggtgaattttaaaggtgttttaggattaatcggcgtctggtttggttacggcatcattgatattttattcaaacaagtggcgaaaagcggcggcgcatttcctgcaacattatttatttccttctcgctggcagcttgcgttatgtttatctatttattcttaaaacgtgcgcaatggacatcatcaagtgtaattggcggcatcgttttaggtgtattgaatttctttaatattttattctatataaaagcccatcaaagttttgctggaaatccaacgcttgttttcgctggaatgaacattggcgtgatttgtttaggcacgataactggcgcattagtttttaaagaaaaaatcagtaagctaaattggattggtattatttttagtttatcagctattttctgcctatattatttagataaaattattgcgtaaaagagagtagtcatggcaaaagatttcagcttttttatttacgattatgaaagttttggtgtaaatccagcaacagatcgccctgcacaatttgcgggtattcgtacagatgctgattttaatatcattggcgaaccaataatgttttattgtaaacaaaccaacgattatttaccggctcctgaagccgtaatggtcacaggaattacgccgcaagaatgtaatgaaaaggggctttcagagcctgaattcgccgcaaatatcttagcagaattttcccaacccaatacttgtgtcatgggttataacaatattcgctatgatgatgaaatgacacgttatacgttttatcgtaatttcattgatccttatgaatacagctggaaaaacggaaattcacgctgggatttgttagatttagtacgagcctgttatgccttgcgtccagaagggattaattgggcttatgacgatgatggaatgccaagtttccgcttagaaaaactcactaaagcaaatggtattgagcatgaaaatgctcacgatgccatggaggatgtatatgcaactattgctatggcgaaattaattaaagaaaaacagcctaaattattccaatatttctttgaaaatcgcggtaaaaaagaaatcgaaaaattagttgatacaggcgcaatgacacctttagtgcatgtttctggaatgctagggaattatcgtggaaattgcacttgggttgcacctttagcttggcatccgacaaatcaaaacgcactcattgtttgtgatttaactggcgatatcgataatttattaaccaaaagtgcggatgaattacggacagatttatataccaaaaaatctgaattagaagaaagaggagtttcatctgttccgttaaagcttgtgcatatcaataaatgtcctattttagcaccagctaaaactttgttaccagaaacagcaaatcgattgggtattgatcgacaattatgcttggataatcttgcaaaattacgagcatcttttgatattcgtgaaaaagtggcggatatttttaatgaagaacgtcaatttgcatcaaatgataatgtagaaactgagttatacaatggcttttttagcaatgctgataaaaataatatggctattttacgtagtttacctgcagaaaaattatctgaacatggtttagcttttgaagataaacgtatccttgaattattgttccattatcgcgctcgtcatttttataaaaccctcacacgcgctgaacaaattaaatggaaaaaataccgacagaataaacttgaaaaaagtgcggtagagtttgaatcaagtttacaacgtttagctgaggaacattcagataattctgaaaaactatctttgctacaacaagtatatgaatatggtataaaattactaggttagtcgatacgttgtcacatttcgtcaaaaagcacgttttaataaaaacgtgctttttttgttgtttttctgggaagaaaatatccaagaaattctccagattttacgtagcgtaatcacatagatttaagcttatttcactttacatttcctttacatttaaactcatccgttcaataactctataaaatgacgcgttacaacgtgttatctagccttattttgtcttgttttgctagtacttgtaacttgtgtataactgtgtgatttatttaatccgtagtttccgctaacccgataactaatttcgcataatgtatattatgttaaattataaaaatgcaaagtaactttttaattataggttataaagagattatttctcctctcttaattagttatacttaatcaaataagatgaacgagtaaattaatttagagccatactatgacgtttatttacagtgttcgattcatgggtgtgaaagtactgcagcatttaaagatttatgcttgattgataaagatttatgcgtgattgataaagatttaggtgatttagcaactgctacataatctaaataatataagtttagatgggtgaaaaactaccaagctgtgttttttatgtatctaagctctccactagcccaccattttcgattttctgatgtgttactactgtgtcagctaatacttacaacgtgtattatcattgaatttctttattattttttgatatgacaaagcgtttaggtatgataaacgaaaaactactacccttcgtttcagtactttcaatatttaaatgagaatgatattgtaataaagtatgcttcacaatagctagtcctaaaccacttccaccagttaaatggctacgagattcatcaactctataaaaacgttctgttaaatgtggaatatgctgtggtgatatgccaacaccattatctatcacgttaaatttaataccctgttcacaagtttcccattgaatttgaatatgacactgtttaccagaatgcttaatagcattataaattaaatttgaaacggcacttcttagttgagattcatttccaaaaataatgatattaggctgaataataaattcaatgtgatgattataagtatttaatatatctgtatcttttcttaaagaatttatcatagctgacatatcaaatgtacgaaaatccttatctgaagttgtttctatttttgctaaaaaattaaattgttgtaatagatgttccattcgttggctttgctcttgcattgcaaaaatagcctttttttgtagagggttctgaatattattatctgcaagaatttctaagtaaccttgtaatacggttaatggagtacgtagctcgtgattaatattactcaagaatttttggcgtgaattaagtaaatgaatcatatctgtaatatctcgagcgataactaaaatcatatgagaattataagcgtgcgactgcacctcaatataacgttgattataagttaatagtactaacggtcgtctttttttttgactgaaaaaataatgtttaaattgttcataaaaaataacatcaaaaatatttttctggacttttttattccaacaaaaatcaaacatctgttgcgcaattgaattacaccaagaaatattaccattatgctgacagataataattgcatctggtaaatacttaatatttttatttatttgagataacaaacgtaaacttgcacatttttctttgtaaatttgatgacgatggtaggcttcagtttgagagaatgttcctaattgtaataaagagaatttattatcttgctttaaattgagatatttgagtaaacgatattcattaatatgatgccaagctaaaattaataaaagtattattgcaaaccaaagaataaaatcagaagtaaataaggaaataatgattgccaaatttatttcaacaataaaattcaatatttttttcattgtttatctcgtaaataactagaaaatcgataaccagatcctcgaactgtttggatgtaatgttcacattgaaaaggggctaaattacggcgtaaacggcgaatatagctatcaacagtgcgatattcaacttctagatcattatgccaaatacgatttaacaattgttctctagaataaactttttcagggtgcctcataaaaaaatgtaacaatttaaattctgtactacttaaattaatttcctgctgttggaaaaacactctctgagcattttcatcaatggaaagttcatcgatttgtataaattgactttgttgttcataaattctcctccatactgcctcaatgcgagctaataaaatttgaggtgaaaagggtttagtgatgtagtcatcagcccctgcatttaaacaggcaatacaatcttcttctgtacttttagctgtgagcataataatgggaatcgcagcatagctttcttgctttttaatatactgtataaattgtatacctgaacgaccaggtagcatccaatccaataatattagtttaggattttcttttatcttgtttatcgctgttttgaaatcgctcgcttcaatcacatcatagtatttttgagataaaaacagtgtgatcatttcacggattgcacattcatcttcaactatcagaatttttctcgtcataatactccttcatttgatttatggcataaaagtgaagtgagaaataatacattctcaccaaacttttactttttaataagagagagctcagaataactaccccattttaccacgaatataatcttctgtacgttgtatcttgggtctatcaaaaatttgttgtgtttgaccaaattcaactaattcacccaaatacataaatgccgtatagtcggagcaacgtgtagcttgttgcatattatgagttactataaccacagtataatcttgttttaactccgtaatgagttcttcaattttcatagtcgaaataggatctaatgccgaacaaggttcatctaacaacaacacactaggtttaatagcaatccctcgagcaatgcacaagcgttgctgttgtccgccagataaactatctccgcttttatgtaatttatctttcacttcattccaaagagcggccttagtcaatgcccattctactcgttcattcatcttttcttttgataatttttcaaacaaacgaacaccgaatgcaatattatcataaatcgacattggaaatggcgttggtttttggaaaaccataccaaccttagcacgaatcagagaaatatccatctttgttgtgagtaaattttcaccgtctaaattaatttcaccagtagctttttgatttggatatagttcaaacatccgattaaaactccgcaataaagtagatttaccgcaacctgaaggaccaataaaggcggtcactttattcttagcgatacgtaaattaatgttttttaatgcatgaaaatcctcatagtagaaatttagattttgcacagctattttggtttcttgtagactaatcatattgcctcattattttttatgttgaaagaagagtcgagtgaaaatgtttaagcaaagcacaaataatgttattagagctgcacctgcccaagctagattattccaatctgtaaaaggacttgctgcatattgataaataactacaggtaaatttgcgataggttcattcatattccaagatagaaattgattagacagagcggtaaataatagcggtgcagtttctcctgaaattcgggcaactgctaatagcacgccagttaaaatccctgatttagctgctcgataacaaatcatcataataacttgccattgagagcaaccaagagctgccgctgcttcacgtaaattatttggtacaagtaataacatattgtccgtagtgcgtaccacgataggaataagcaataaagctaatgcgaatgctccagcccaccctgaaaaatgctcgatttttgatacatataagctgtaaacaaacaaaccaataataatagaaggggcagaaagaagaatatcattaagaaaacgggtaatttgtgcgaaacggctataacgaccatattctgccaaatacgttcctgccaatacccctataggcgtgcctatcaatgtacccgcaccgacaataaaaaacgaaccaatcagtgcatttaacaatccccctttttcattaggggcaggggtagattgtgtgaataaatcaattgataaagctggaatgcctttggtaattagagtgaataatatccaacacaaccaaaataagccgataatgactgaaatataggaaagccctaacattaatttattgtgtgttttacgccaataaaaacgcaagttttgattagttttcatcttatttcccttttgtttgttgcatttttgtaatcattaatcttgataaaatcaataccatagttgtgataacaaagagaagtaatcctaattccatcaatgcagatttttgtaatccacctgcttcattaaattcgttagcaatagcagatgcgattgaggtagaaggtgaaaataaggaattaggcaattgaaacgaattacctataataaaagtgatagccattgtttcgcccaatgctcttcccaatcctagcatcacactcccaacaagccctattctagtgtgtggtacaatcacttgtcgaaccacttcccaagtggttgcacctaatccataagcaccttcttttaacattggtggtactatactaaagacatcccgcattacggatgcaataaaaggaatgatcattatggcaagcactaatcctgccgtaaataaaccaacaccaaaaggtacgccagaaaaaaataattctaatccaggtaaattccccaaattgtcaattagtactggctgaatatgttcttgaaataatggaacaaaaacaaacaacccccacattccgtaaataatagaaggaattgcagctagcatttcaattgcaatgcttataggacgttttagccaattgggagctagctccgttaaaaaaatagcaataccaaatgaaatgggtactgcgataaataatgcgatacccgccgtaataagcgtacctaaaataggaataattgccccatattgttcttgtacaggatcccaatatgtttctaatagaaaactcccaccaaaacgtttaatactttcccagcttcctatgactaaagaaattaaaatagcagcaagtaaaataaacacaagcaaagcaaacaatgccgtagtctgtttgaataatgattcaatccatgtttgattaaaatatttccgactttttgtgagcataagtattttccaaaattatttaagataaccgcactttattaatgttaagtgctaggttttgtataaagtgcggtataaaataaagagatttttattgttttagctctgttttccattgacttttaatggtagacaccacatcagctggaattggcacataatctaattcagttgccgcatcttgccctcttgagaatgcccaatcaaaaaaggctaatacatttttagttgtttcaggattgtcagaatatttatttaataaaataaaactcgccgccgtaattggccaagatttttcccccgtttcattggttaatataacacccattcccgccttttcgtgccattttgcgtgacttgcagctgccatgaaactttcattagaaggctgtacaaattgccctgcttgattttgtaatgaaatccaagcaagctgattttgtttggcataggcatactctacataaccaatgctgtatttcatttggcgaacataagaagcaactccctcattcccctttccaccttgacctgttaaccacttcactgatttaccttcaccaacttgatttttccaatcgttcgaaactttagatagataattagtgaagccaaatgttgttccagagccgtctgaacgatgaatcacaataatgtttttatttggtaaaggaagcgttggatttaatgcaactaagtcaggatcgttccattttttaatcttaccaaggaagatttctgctaacagcttacctgataactttaatttaccaggtttaatttcaggcaaattaacaacaggcactataccaccgataaccgcagggaattggactagttggtgttgttgtaataattcggatttcattggatcgtcagaggcaccaaaatcaaccgtttttgcaataatttgctgttgtccgccgcccgaaccgatggattgataattaactttattcccagtttctttctcatataaagatgcccacttcgcataaattggataagggaaagacgctccagcaccagtgatgctattagcttgagcaaaaggtaacgtacctaaggttaaaacgataataagattttttttcattttatgcataaacataacaaattctccttgagtgttatttagattgcgtagcgaagtgtagaaaataattgtgacagtttgatgacaatatgaaaaattttaaatggataatcaaaagaaagtagttataagaaaagtacaggtaaatttgacctgtgtttttctagcagaatgatattacatttgtcaattaattgataacgatctttaggtttaattttaggtttaataaaagttggtaagttttcatgtttactcgataatctaaattttcatccaaatctaaggaggaaaataaagacatatctaatactaatttaaaatttgttagttttattgtgacaacgtcatatttaatttatatagaattatgtaaatgataataattgttttttatttttctttttaaaattaattagttatatcaaaatttttgataaaaaaacttgcaattatcatttgtgaatttaaaatgattgccgcaaattatgctttattgcattttatcaatcaaaatggaaaggaattagttatgcttaatcaaataatcataaacaagctgaacgaccaaattaacttagagttctactcttctaatgtttatttacaaatgagtgcatggtgttcaaaacacggttatgagggggctgctaccttcttacttcgtcatgctgatgaagaattagaacatatgcaaaaactgtttaattatgtaagtgaaactagtggtatgcctattttaggaaaaattgatgcacctaaacatgattattcttcattaagagaagtttttgaaataactttagaacatgaaaaattagtcacgtcaaaaatcaatgaattagttgaagttacttttgaaagcaaagactactctacttttaacttcctgcagtggtatgtagcagaacagcatgaagaagaaaaattatttagtggaattattgatagatttaatcttgttggcgaagatggtaaaggattattctttattgatcgtgaactcgcaactttggaatagataggagaaaatagtatgttatcagaaaatgtagtaaaactattaaacgatcaaatgaatttagagttttattcttctaatttatatttacaaatgagtgcttggtgcgatcagcaaggctttgaaggcactgcaaaattcttatcagttcatgctgctgaagaaatgcaacatatgcgtaaattatttacttatttaaatgaaactggctcacttgctgtaatttctgcaattgaagcacctgcacatgaatataaatcattaaaagaaataattgaaactacctatgagcatgaaaaattaattaccagtaaaatcaatgaattagtaggtaaaacctttgaagaaaaagactactctgcatttaatttcttacaatggtatgtggaagaacaacatgaagaagaaaaattatttagtagtattttagataaattaaattttcttggagaagatggcaaaggcttgttcctaattgataaggatttaggtaatctctctactaaagcctaattatagattatcaaatctggcagatcttttatttaaaataatgtgtctgccagattattttattccaaattttccaaaaatattttctattgcataattacatctcgtaatcttatttctaatcttatcaaaacatattgcttgccttatattaagtatattttgagttaatcaaggtattataaaatgaaaaggatctatactgatgaaccgaccaaccaaccaaccaaccaaccaaccaaccaaccaaccaaccaaaataataaaaccgttgcggtagtgacttcaacaattggtcgtccagaattatctttggctattaaaagcgtacaaaatcaaacttatccatgtaagcattatgtatttgttgatggcaatattttctgggataaagccaaatctatatttatagaatattatggaggttgcccttgggcaaaggaataaaaaatacaatttttaatcaaaaagtataaaaaataaaaatcaggcttgacttatttcttttgcactagtttaatagtacaaaattttccaaaaggataaataaatatgaacattcaaactcaagcctttattgcggtgacagctcaacccattccctattatgctgacaccaccgctatttttaatacactttgccaacctaattcaaattctcttctactcgattctgccgaaatcggaagtaaaaatagtttacaaagtcttattttagttaatgctgcagttaagataacttgtttaggtcacaacgtcacatttaaagctttaaataagaatggaaaacaagttttaaaagaaattcatccaaaattaaccgcacttggaaaaataagtgcggtcaattttgaagacgaattttctgtacaattttcaccacttgataatcaactcgatgaagatagtaaattacagtctgccactatttttgatggactgcgtgttatttctagtctttatcaacatagccaaacgcctattttcttaggcggattatttgcttacgatctcgtcgcaaattttattccaatggatggtattacattgcaaaatgatggtatcaactgccctgattacagtttctatcttgccgaacacctcattactatcgatcatcaaaatcaacaagcgacactcaaaagtttctgttttgctcaagaagaacaagttaatattgcgaaaacctccctttctatcgcacaaaaactaaaaaatattgatcacgttctttctattaaagcggcaagtgatgaagttaaaacaaactttgacgatcctgaatttactggtatcgtaaaagccttaaaacaccatattaacattggagatgttttccaaattgtgccttctcgccgtttttcccttgcttgcccgaatacattagccagttatgctcaactcaaacaaaataatccaagcccttatatgttctatatgaacgatgaagactttattttgtttggtgcatcgccagaaagtgcgctgaaatatgcgccagaaaatcgtcagctagaaatttacccaatcgcaggttcacgccctcgtggttttgatgctcacggcaatatcgatcctgaattggatgcgcgtttagaactagaacttcgccttgatcacaaagaacaagcggaacatttaatgttggttgatttagcacgtaacgacattgctcgagtttgccaaagcggtacccgtaaagtggctgagttaatgcaggtggatcgctattctcacatcatgcatttggtctctcgcgtagtgggtaaattacgccctgagttagatgcacttcacgcctatcaagcctgtatgaatatgggcacattaactggtgcgccaaaaatcaaagcaatgcaacttatttatcaatttgagcagcaaaaacgccatagttacggtggtgcggtgggttatctcacttccgatggacattttgatacctgtatcgtaattcgttctgcttttgtacaaaatggaatagcccatgtacaagcaggttgcggtgaagtgttggattctgatccacagatggaagctgacgaaacacgccacaaagctgcggctgtcttaaaagcaattcgtcaagttaatacacaagcaaaataaggaagaattattatggctaatattttatttttagataacttcgattcctttacttacaatcttgtggatcaattccgtgttttgtgtcacaacgtcacaatttatcgcaatgactgcgacttagaaaaactggtagaaaccgcactcaatacacctgataccattcttgcactttctccagggccaggaacgccatcagaagctgggattttactgccattgatcgaacgcttaaaaaataaagtgccgattattggaatttgtttaggtcatcaagcgttgattcaagcctttggtggtaaggttgttcacgctggcgaagtgttgcatggtaaagtttctcgtatatcccatgataacgaagcgatgtttaaagatcttgctaatccaatgcctgtggcgcgttatcattctttaatgggacaagatttaccaaaagaatttatcgtcaatgcggaatataatggcattattatggcaattcgtcatcgtgatttacccatttgcgcattccaatttcaccctgaaagtattttaactgtgcaaggttcgcaattattacaacaatcaattgaatggttgttaaatagataagacagaaaaaagtgcggtgatttttaaccgcactttaaaggagaaaaaatgatcactgtattcggacttaaatccaaactcgcaccacgtcgtgaaaaactcgcggaagtaatttataacagtcttcatctcggattagacattccaaaaggcaagcatgcgattcgctttttgtgtttagaaaaagaagatttttactacccttttgatcgtagcgatgattacaccgtcatcgaaattaacctgatggctggccgtatggaaggcacaaaaaaacgcttgataaaaatgctatttagcgaattagagtacaaactcggcattcgagctcacgatgtggaaattacgattaaagaacaaccggcacattgctggggtttccgaggaatgacaggtgatgaggcacgcgatttagattacgatatttatgtttaataaaatatagaaaattaacaaatccacatacaaagaaaaataggaatagactatgcaacacaacccattattagaacaactttatagcgggcattcactttcaacctcagaaagcaccgctctttttaatgcagtcatccaaggtgagctttccaatgaacaaattgctgcaatgcttattgctttaaaagtgcgggaagcaaatactgaggaaatttcgggtgccgttgccgcctcattacaaaatgccaaagcatttccatatccaaattatccttttgcggatattgtaggaacaggaggcaatggtcaaaacactattaatatttccactaccagtgcgattgttgcggcatcaatgggagcaaaaatagcaaaacatggcaatcgtagcgtgtcgagtaaatcaggtgctagcgatgtgcttaccgcacttggcgttaatgtgaacgtcacaccagagcaagctcgacaagcgttagatgaaattggtgtctgttttttatttgctcaacaatatcattctggcttccgccatgttgcgccagtccgtgccgctttaaaaacgcgcactatctttaatattttagggccgcttatcaatcctgctcgcccaacttatcatttacttggcgtatatgcgcctgaattagtaaaaacctatgctgaaaccgcagttgccttagaacatcaacattcctttgttgtacatggttctggcttagatgaagtcgcattgcacggcgaaacacaagtggcagaaattaaaaatggcaaaattgaatatttcactttaacgcctgaagattttggcttaaaaacgcaatccctcgaaagtcttcgcggtggtgaaccacaagaaaatgcccaatatctaaccgcacttttacaaggcaaaggaaaggctgaacatgctaatgcggtggctgcaaatacggcattattattgaaattattcggttacgatgatttaaaacaaaatgtgcaaaatgtactggcgcatcttgtatcaggtaaagcctttgaaacattacagaaattaaccacatattaataaaagctaatttgatacaccacaataagaagaaaaatgatgattactcaagattttactaaacccattgattccgctacggtgctacaaaaaatcgtgcttgacaaagcgcaatgggttaaagcaaaagaaaaggaatttcccctttcacaatttaaacaaaacattcaaaactctgaccgctctttttatgatgcgttagcaaaaggcacgcatcaaaagcccgcttacattttggaatgtaaaaaagcctccccttctaagggattaattcgtgctgaatttaatttggaagaaatcgccaatgtctataaacattatgcctctgctgtatctgtgctaactgacgaaaaatactttcaagggaattttgaattcttgcctttagttcgcgatatcgtaagccaacctgtgctttgcaaagattttatgattagcgaatatcaagtttaccttgctcgctactatcaagcgcatgcaattttattaatgctttctgtggtaaacgatgagacttatcgtgtgctggcagagcttgcgcattctcttggtatgggcgtattgacagaaaccagtaatgaagaagaatttgaacgtgcccttgcgcttggtgcgaaaatcattggtgttaataatcgtaacttgcacgatttaactgtggatttaaatcgtgttgttgaactcactgaaaaatacgccgactgtattcctgctgatgtacgtattattagcgaatcaggcatttacaatcacaagcaaattcatcaattacaaaaggtggcgcatggtttcttaattgggagtagtttaatgggcaatcaagatttgaataatgcggttcgctcggtaatttttggagaaaataaagcatgcggtttaacgcgcgcgcaagatgtcaaaatcgtttacgaaaacggcgcactctacggcggattaatcttcgcagaacattcaaaacgctgtgtgagtttacgccaagcgcaagaattagtaaccgctgcgccacttcgatttgttggtgtttttcagaatcaagaaattgactttatcgtcaaaatagccaaccaattacagctttatgcggtgcaattacatggtgcagaaactgaagcatttattaccgcacttcgccagcaactaccaaaaaacacgcaaatctggaaagcgatttcggtcaatactgaaacccaaagtgcggttgattttactgatgatttaaatgtggatcgttatatttttgatagtcaaatcgcgaaccagcaaggtggcacgggtaaaacctttgattggtcattaattcctgaaaatcttaaacacaagattattttagctggaggcatctcaccaaataatgtggaacaagccattcaacaaaattgcttaggcttggatcttaattctggggtggaaagttctgcgggcgtaaaagatcaagaaaaagtgcggttagtttttaataatatttattaattttaataacatagaaatcactaaatttcagcttaaatactaataggagtaaaaatattatgtgtttaggcgttccgatcaaattgtcaaaattgatgaaaattctcttcaacttgccacagtagatgtatgtggcgtacaacgtgaagtaaatatttcactagtctgcacgggaaatccagccgatttacttggcaaatgggtgcttgttcatgtgggctttgcaatgactgttattgatgaagatgcagctaagaaaacccaagaggctctgatcacaatgagccaacttgaacatgaagttggagattttttaggactaaatcaaaaataaaaagtaggcataatgcctactttttatgttttgttacaacgcctcaatcgccttatactgctcttggattttttctaatccagattggtattccgcttgtttttcgcgttctttcgcaatcactgcttcaggtgctttagccacaaaagcttcattgctaagtttattctcgatacgtttaacttcgttttgatatttttcaatctctttggttaaacgggcaagctcggcttctttattgataaagccagccattggtacgagtaattccgcattgccgactaatttcgctacggcaagtggtgctgtttcgtttgcggctaacacttgaacgttgtctaatttcgccatggcttttaaaagagcggtctgtttttcgagaatttttgcattttctgtgcttaaattacggaataacagatctaaacctttacttggtgcgatgttgctttctgcacgaatattacgcaccgcaacgatcacttcttttaaccactcaatttcagcttccgcttctggatcaaagccgctctcttccacttgtgggaaaggttgtaacataatgctatcagcagtaatgccgacaaatcctttcactttttgccaaatttcttcggtaataaatggaatcagcggatgcgctaaacgtaataatttttctaacacatgaaccaaagtttggcttgccgcacggatttgtgctgcgttgccgttggcaaatactggtttagtcaattctaaataccagtcacagaattggttccaagtaaactcataaatcgcattggcacaaaggtcgaaacgatattggcttaatgaattacggaaagtttccacggtacgattgaattctgattgaatccaacgatccgctaatgagaattcaatttcgccttggcttaaatctaatttttcattcgttaagacgaaacggcttgcattccataatttgttacagaaattacggtagccctctaaacgtttcatatcccagttgatgtcacgaccgtttgaagctaatgccgctaatgtgaaacgcaatgcatctgtaccgtgagccgcaataccttcagcgaattctttgcgcgttgctttagcaattttctctgctaattgcggctgcatcatgttgccagtacgtttttcaagtaaatcttcaaggctaataccgtcaatcatatcgattgggtcaagcacgttacctttcgatttcgacattttttgaccttgttcatcacggatcaagcctgttacgtacacggttttgaatggtacttgtggtttgccgttttcatcttttacgaagtgcatcgtaaacataatcatacgtgcaacccagaagaagatgatgtcaaagcctgtaattaacacatccgttggatggaacattttgagctctttagtttgctctggccaacctaaggtagagaacgtccataagcctgatgagaaccacgtatctaacacgtcttcatcttgtttgagttcaaccgcagaatctaagttatattttgaccgcacttcttcttcgttacgcgcgacatacacgttgccttctgcgtcataccacgctggaatgcggtgtccccaccaaagttggcgagaaatacaccaatcttgaatatcacgcatccaagagaagtaaaggttttcgtattgtttcggcacgaattggatttcgccatcttccaccgctttaattgccacatcagcaagtggttttacgcttacataccattggtcagttagcatcggctcaattggcacaccgccacggtcgccataaggcactttcaaatcgtgtggtttaatttcgtctaataaacccagtgcttcaaaatctgcgacaattttcttacgcgcagcaaaacgttctaagccacggtaatccgcaggaattgtcgcttcatagccagcaagtggtttgccgtcagtaccgataatttccgcttcatcacgaatatttgcgttcagcgtcaatacatttaccattggtaaattatgacgtttacccacttcatagtcgttgaaatcgtgtgctggggtgattttcacgacacctgtaccgaattcacgatcgacgtattcatcagcaataatcggaatttcacggtttgccaatggcagaatcactgttttaccgattaaagattgataacgctcatcttctggatgaactgccaccgccgtatcgcccaacatggtttctggacgtgtggttgcgaccactaaataatctttaccatctgccgtttttgcatcgttagctaacggatagcggaaatgccaaagggagcctttgctttctttattttcaacttctaaatcagaaattgcggtgtgaagttttggatcccagtttactaagcgtttgccacggtaaatcaacccttcttcatgcaagcgaacaaacacttcttttactgcattcgataaaccatcatccatggtgaaacgttcacgttcccagtcgatagagtttcctaaacgacgcatttgttggctgattgtgccacctgaataagctttccaatcccaaattttgttgatgaacgcttcacgaccataatcgtggcgagttttgccttcttcagccgcaattttacgttccaccaccatttgggtcgcaatacccgcgtggtctgtccccgcttgccataaggtgttatgcccttccatacgattaaaacggactaaggtatccattaaggtttgttggaaagcatgccccatgtgtagagaacctgttacgttcggcggcggaatcgcaatgcaatagctcggcgcatgttcattttcagtcggtttaaaataaccgctctcttcccaatgttgataaagggcttgctctaccgcagacggattaaaacggtctaccatttcgaatttttgtgtcatttattttttctctttattataaaagcagttatttttttctatccctaaacgattaactgcaatattatatattccattatttttctcatatccaatgaaatgtctatttaattctttagctgctaataatgtagtaccactaccagcaaaaggatctaatacaatttgttcttcttttgttactaaatcaataagcaatttcattagattaagtggtttttgagcaacatgataacctttgtcctcagaagttattcttacttttagtatattagaatgatttaaagctccttgttgtatattccaatgagttaacgaattttcattccaagctccaacttcatgtttgattaaattatcagctaatgtactgccagttttatatggtttttgaaaccataaaataggctcaaataaaggtcgtaaattagcaactctccaaccaacccatttattagtattagcaatatcgcctcgacgttcaaacacacaagaaattctttgtgctctatgtggagctttgtctttttcccaactcaacatatctttgaaagtaaaaccactattttcaaacgcaacaacaactctgtgtgcaaattgtcttcctgcaaaaacaaagactgaacttcctgactttaatactctaaaccattcattagaccaactttcaacccactcttgatactcttgcggtcttttcttatcagcctctgaccaaccatttaatggtttacctcttcgtttaaacaatgatgttttgtgttgagctgaagatgttcctcctaatgcactattagtattggaatgcaatatatcccaatcatcataatcaattccataaggaatatcagagataattgcatgaatagaattactatccaatttttttatttcaaaaatagaatcagaattataaatacagtctatcattactttttatccctttaataaaactatcaatagtttctatttttgaagacatatttatatctttcaataatgcttctatggcttcttctcttgtaaaattttttataatatttatttgttttttccaatattccttttctatcaaggatctttcttcaataaaattgatctctttttgaagaagttgatttaaagtatctttatctattttaaataaatccataaagtatttattaaaatctctcataaaattattttcagcatcagatacagatgtttttttactttgctttttgggaaagttccataattgctcaaaagaaaaaatattagtttcctctaaatctaactgtaataatatagctaaatgttcccaactaaataacaaaacattttcatctaacgattgcttaaaaatttgacttttagttgtaggatattgaaaaaatggtgctgttaatactgcataatccttatcttctcgccattcacttaacgcttttactttaaaatctttttgatttttagcagtacgactaagtcgaaaagatttagcatcagcaactaagccgtaattaaattctttagagagtgctatcacatctccagcattacctctctgttctaatggttttgagttcagattaagtaattgaaaagctttaactaatacaatatctcctgcttttgagaataatttctcttgtgtagaacttggttttattgcctcaggaagtattccaatagatctaaccaattcaataacctcatttctattcaatttataaataaatgagattaaactattagttgcctgtttaaattcttgattagttaaattttctatcagtgataataatttctctaacgcacttttcttcattaaaatactcctttaagctaaattgaattacccaaaagataatctcattcggataaatcccccgaatcacttctttcaactcattcaaccccatattctcctgcttcgcatgttgttccgtcagttcattaagagtaatcggcgatacacttaacacttcaatcgtgcagaaatattgattatcttcaaaccgccccacacgtaaaatatcgcctgctttaaaatggctttcagatttatctcggatggtgatggttttacgccctgcgagaatatcggcttcaaaacgttggtaaaaagtgatgtcatttgattgcattttgatccttaaagagcggttatattttagttgaaaaatcaattcgggtgtaatgcctgaattatcataaataaaaatttcatcacaatatgacaaaacaagaaataaattatctaaacttatttaataacgatattttacaatatcttcagcaataaaatgaccaccactttttactcttgccttaatccgtgcaagatttatttcaatgcgattaataccaatataatttaaatgtacatagaaaccattttctttagcgttctttattctctgaataattgaattacctgaaagtgtcgattccatggaaaaatcaatatgtagcttaatagcaaaacgaaatagctctatcgcttttctgcctgcatcaatatcagcaagtcttggattttgaggattaatctgcattgcaatatgatcagaatcaatcacaatttgcacagcatcttggttaaaagaacgtaaagtactttttcccgaaccatttttctacaataaaaaatcgctttattttgcataacccacaattttttccgaaccatccggataatgctcgactatcttgccatcagttttttgaaaggtaaccacctcgtgattcattttctctttcatccaaactgaaaataacgctttaattaattcaaaacctactgctcaatactcaaaattgaaagcgttgataaaaggcaatatcgttcatttattaacccacattttcagtagaaagattccaaccttgcagacgtaattgtttataacgttctcgggcttgtgtttttaacgcatcatctttcggcacaaaatcaataatttgggtaaaactgtggctaaaatctggaatttcttgttgcaaattaattaacacatcacggcgttgtaaatttcgtttcccaagccatgaaatctcaatcggtgtgggatattgtgttgcctcccctgataaattatgcggaacaaattcattgggatctcgttgccacaaacgctcgtcaatctctagcgcttgagcctcactttcgcaactaattagtacttttttccctgaacgccatattgaagcagcaagattacaggctatttcttcgacagttaaagtacaattttccgtaagaatataaaattgtgcagtttttgccattttagcctcgttattttctcaatcttgccctataaaaagggtaaaattttaacgaaaaaaccctaaaaaataaataattaaatatacattattacaaatgcgtggaaatccaccgcacttttatgatctatgtcacaaaactgatttttaacgtttttgttacgttccactcataactcggaagtgttaaaatcgcttgcgttttaattttcattcaattcataggagtacagaatggcatttcgtattgaaaaagacacaatgggtgaagttcaagttccagcagataaatactgggctgcacaaactgaacgttcacgcaataactttaaaattggttcagccgcatcaatgccacatgaaattatcgaagcttttggctatctgaaaaaagcagccgcatttgctaatcatgatttaggtgtattacctcttgaaaaacgtgatttaattgctctagcttgtgacgaaattttagcaaataaattagatgatcaattcccacttgttatttggcaaactggttcaggcacacaatccaatatgaatgtgaatgaagtggttgccaatcgtgctcatgtgttaaacggtggaaaattaggcgaaaaatctattattcacccaaatgatgatgtgaacaaatcacaatcttcaaatgatactttcccaacggcaatgcacattgcggcatataaaaaagtagttgagcacaccattccttgtgttgaacgtttacaaaaaacttttgcggcaaaatctgaagccttcaaaaacgtggtaaaaattggccgcactcacttaatggatgcaacgccactcacattaggtcaagaattttcggcttatgcggctcaattagatttcggcttaaaagcattaaaaaatacgctgccacatttaagccaattagcattgggtggaactgcggttggcacaggtttgaacacgccgaaaggctatgatgtgaaagtggcagattacattgcaaaattcaccgcacttccgtttgtcacagcagataataaatttgaagcattagccgctcatgatgcgattgttgaaactcacggtgcattacgtcaattagcaatgagtttatttaaaattgcgaatgatattcgtctattagcatctggccctcgttcgggaattggcgaaattttaattcctgaaaatgaaccaggttcttcaattatgccaggtaaagtaaacccaactcaatgtgaagcgatgacaatggtctgcgcacaagtatttggtaacgacaccaccatcgcatttgtgggttcacaaggtcacttccaattaaatgtgttcaaccctgtgatgattgcaaacttcttacaatctgctcaattattgggcgatgcttgcgtatcttttgatgaacactgtgctgtaggtattgaaccaaactatcctcgaattaaacaacaacttgaaaattcattgatgttggtgaccgcacttaatacacatattggctatgaaaacgcagctaaaattgcaaaaacggcgcacaaaaatggcacaacattgcgtgaagaagcgattaatttaggtttagtgtctgccgaagattttgataaatgggttcgcccagaagatatggtgggtagcctaaaataattcatcgcacaaattaacatcagtaatattaaaggcgagtaaaattactcgcctttttactcgtttctcatttgttttttgatgcggtttgttataatcaacacaattttattcacggcaatttattatgaaaatgaaatccctttttgtggcaatgataacgtttttttctaccgcaccttttgctcattggcaacccatcggaaatgccgaatacacttgggggccgttccatgtttataccattggtttgttttctgaaactggcacttatcaagaaaatgaacgtccattaatgctctctttcaaatatgaaaaacccattgaaggaaaaaattttgcgattacgctcattaaagaaatcgaaaccttaaaacttaatgatggcgatactcaaagctggcttaaagaaatgcaatccacatttccggatttttcaccaaacgatatcttgaactatattgccttacccgataaaggttactttgtcttaaatgatacagttttggaacacgattttgatgctaaatttaatcaggcatttatcggtatctggcttgcaccgaatagtacttttgtaaaacttcagccacaattattaggcaaaacgaaaagtaatcatgaagcggctgaattttatctcaaacctgaaattgaatcctttgatgaacaagattctacacctgaattaccgccaaattatttattagatagtcagaaaaaatctcaaggataaattcagttttttatattttgcaccataaaaaatacctgtttccgaataaattattatcaaggaaacaggtatttattatttgaacattctctatctgactaaaatttttcccaaactgggataacgctatcaactaaatctaaattttttcctaactcaacccaaccacaagggaaatggaaatcagaaccaaccgaacccagtaaatcaaattcttttgcccaacgagcaagcatttgacgctgatcttttgcctgaccacaatccgccatttccatgccatcaccgccccaagccttaaaatcggttatcagcttacgcacccatttccctgtcatgttataacgcaatggatgcgcaataacggctacaccgcctgcggcatggattgtctcaatcgccgtgggaacatcagtccattcagctttaacaaatgccgattttccttgccctaaatagcgtttaaaggcctgaccatcattagataccttaccaatctgcaccaaataacgtgcgtaatgagcacgcgtcacttcgccatcggctaaagctttcgcaccttcataagcattaggaatccctgctttttctaatttatcgccaatttccaccgctcttttttcccgtaatgctttttgactttgcaaaagtgcggtcatttttggatgagttttatcgaagtttaatcctacaatatggatccctcgcccttcccaatttgtcgagatttctactccagtaatcaattcaatgcctacttctttcgctgcaatctcagcttcatcaatacccgcaatcgtatcgtgatcgcataatgcaagcacgttcacgccttgcgcataagcacgatgcgctaattcagttggactcaacactccatctgatgcggtgctgtgacaatgtaagtcgtatttttttgtcattatttaatattttttactaattcttttactaattttggaccgtgataaatcaatcctgaataaacttgcaacaactcggcgccagcctcaattttctcttgcgcattttgcaaaccatcaatgccgccgctaccaataatgggaatctgacctttcagttcttgatgtaatcgcttaataatctctgtgcttttatgctgcaacggctttccacttaatccgccttgctgttcggcatttttcatccccgtaaccgtatcacgagaaattgtagtattcgttgcaataacgccatccattttatgacgaaccaatgtatccgcaatttgtactaattcactttccgttaaatctggtgcaatttttaccgcaatcggcacatatttattgtattggtttgccaaaatagcctgacgatccttgatgcttcgcaataaatcatcgaaataatcaccatattgtaattgacgcaaatctggtgtattgggagatgaaatattcaccgtaatataacctgcgtagttataggctttgttcaaacagaaaatataatcatctttgccttgttccaaaggtgtgaatttattcttaccaatattgatgcctatcacacctttataacgggcgtttttcacattttctataagatagtcaataccattattattaaaaccattacggttaataatgccttcagcttcaatcaaacgaaactgacgtggctttgcattcccatcttgtgcaacgggcgtgacagttcccagttctaaaaaaccaaaacccaatgtaccgaaaccattaattgcatctccatttttatccgctcctgccgccaatccaatgggattaggaaaatttacacccattaccgttttcggaaagcctttgggagcatgaataagagattttaagatcggttgaaataaaggattactggctaatttcaagcattgaatcgtgaaattatgagccttttcagcatccatttggaaaatgccgtgacggaataattgatacatactcgtttatctctcaggatagtttactgtaagaaaagtgcggttaattttcaccgcactttaaaggtaaggttgctcgtattctacgaggaacaaaaatgatgtgcaaataataaagaaataattaatggaaaatattgtaaaattaagctctacacgatcattaatacattttaattatgtataaaaaacggctagttttatttttatggtgcctagggtctttctctttatgttgggaattgccattgttcaatctcctgttcaagtgcggttaattcctctggtgtttttaaagccaacaaacggtcttcaaatgcttgacgttgtccgataatgatgccaatcacgacagcaaactgggcggatttctcaatcactttttctaccacaccacgattttgggcgatttgtgttagcattggggtttctgttgaattatccgcctgccacgctaacgcttctttctcttggcggtaaaaactttcaatttctgtctgtggataacctgccagcaatccatttttaagttggtcggctttgtctgctaatttattgagtaatccctctttttgttgtgcaaaaagtgctgtttatttttcggttgaaatttcccacgtgagggtgtcaagatttaactcgtgtgccgcactgggttgtggctccatcagtgcaggataccctgtgttgtctgcgatgatttgtttaccttgggcttgtccgttaagcagctcaaggtaggtttcttggctaatttctaccgcaccttctggcacaaaaccaccataagaatagtcaaaaaaaccgtttttatagtacatagtcattatttccatctcccaatagtcatccaatctgctgaccccaaataccaacttgttactttcgcagttgtattagttttggcttgcataaatacccagttgtattgcccctttccgcttgctcttgattcgtatcgttctgtaataaaacatcgataatctttatttacatatgcaataggcaggactaaatctgtatgcacagtagtaccttctcgagtaaaaacaactgtaaaaacaactagaccagtctgaatcatcgtcccgtctggatatttccgaatctcaaaatcaccaattttttgataagtaaatgcactatcaattacggcatttactgctttattaaaattcgtaatctgatttactgtatgcgtgtgacttatattcgcctttgtactcagcaactcccttactggctctatatcatttaacttaacccatgcgctccagttgtcttcggcttggcttgtctgatgtcgctcatacatatctgtgctgtatgccacataagctaattgacggcaccaagctccatcacttccagcaataacttggatgtgataactggtcgatacgggcagattttgagagcggcttgcttgcgtaattgcatagatgccatcggtttttaaggtgtttaaatttccacgaaactcttctactttaaaattcccaataccatagcctgcaagtgtattaggcttgccttcaatatccgtattaaattggggttttgccccagcgtggtagattttttggcgtttgtaggttaaatcgccgttagcgtgtatacgaagtgtgccaatctctcggttgtttgatttatattcgaaccagcaatcgccattgtttgccccgatatttaaatggtctccgtgtgaagcatagtgctggctgtctgaaatacggatatttctttttgccacaatacgattttcaaaggatttctcgccattaatgctttcgttaccatttaaaccaacctttccatctgcggtagttttggcttctactgctttgtcataggcggttttcacggcttttgatgttgcggcttcggtttcgctgtcgctgttagtggctgagcttagttgcacgatcccatattgttgtaacgttgcccgtgcaatttcacttaaggcaaactccccatccacgcaataagtcggggaaattatcaacttcgcctcgttttgcagatgatgcaaaaatgctttcatctggcttatttactaatgccatatatgacctctatattaggttgaaaagatattgcacaccggcttggcgtggtagtatacctaagtggttgattgcgaatttcttgaaatcagatgtgctcgcacttggaacagagatagagacggtcatatcgtagttatccacgatgtgacaaccttcgccaaaaataaataggcacgcctcaattaagtttggtagcgtgcctatttggtagtttttaaggattctgcatttaatcaggaaccgataatcatcatcggataatctgacggaatcagacaacggatctcgtttacgataccattgcgcaccgcctagtcttttttggctaaatccaagtgcattgggcgaattgcggaaaccgaaaaatttacgtaattgatagccattaataacccgaaattgcccgatgtgtttaccgaccaaatcaagctgatgccctgttgctgtttcaatattcaacacatcttgcaatcgatataaatcgataaagccttgcccgataatgctttcaaatagcttaatcgttgagacggctttaggcttgtttcggtattgccaaatcaacaaatcagaatagcccattattccacctcaatggttatatccgttgctaaaattcggattaattcacgtggttgtgcggtaatattttccgtggcaagagactgccctttacgcccgatttttagttctttcacccagaaaccgcccactttattaattggcgaataaagtctggaaagcgaaagattttgcccgatgccaaagcgttgaatggataataatcgtttgatttcatccttatccacttcagtaaaatcttcatatcgaacacaatgcatagatacttgcacatcaacaggcgttgcacggtcgaaccgtattgctctacgctcgccatttaccgttaaagttgtttctgcggcaccttgcaacccgacccctgcccctttattttcataaatgacgtgagcgatttgctcatctgccccgccatctacaataatattcaaggagttaggctctacaccatatttatcacgttgtttagtgttattttctagtactttaacttgtctaacatcaggcaatgcggcaatttttgactggattgcatcggctgaattttgcgcatttttggttcagctgatgaaaaaacgttctcgtaattgcaagtctgtttcttcttccttgccaatttctgcattttcgaatgtggttgccgaggtaagcccaagcgtaacggtctcaatggtcaaattcgtgttttttatgaggttaaacgcacccaattcttcgctgcggaagtccgcacgggcggagccattactatctagctgcacatctgccgttaatacccaccgcactttatgtgggtcagacactacaatccctgcataaagatgagttaatggctctcctgtcaaaatcactgagcgtaaatagctataacttgccgctcgtcttattaatcctgcataagcaacacgctgatcgagccaagcacctgtcgcaacatcaggatctaactgtcgatacacattctcggcaagctcctcaatatccatcttcatctgagcaagcaagcccaccatttgcccatcaggcgagttaggcgataggtcaataattttgcccatagatttgtctaaatccctcttcaaatcgtgccacgatttcgtttaatcgctcaatttgaatgccggtttcaatcagttttgccatattttctccaataaaaaccgcccataagagcggtggtttgctagtattattgtgtttatcactgaattaaaaatgtggtcaaaatcgaccgcactttaagtgtcatagcgtgcggtctgttgctgtccgtaaatatcttggtaatcaatcgatatggtcagcttgcgtgtatctgcatcaaaattagcttggtaatcagttattctgcttaccccttcagtttctaacacatagcgttttattttgatttcccagcctgccatatttaccccacgccccatttgttcaagccaaggtaaaccatgctcaaggtctaaaaaccagccattagcaaatgaccaaaggcgagtttgcacattttgagcaatggcatctgattcgcttgcgtagtttgaaaagccttgtccaaatgtccaatcgtgctctttattaagtcgtcttacgctcattctggcactcctgttttaccgccactatcgcctgtatgtttatgggttttgcctgaaataccgcccgctgttacatctgtatcgctcgagataacgcctgtggagctatgcgaacctgtttgcgaggtatcgccctgatgttcgatattccctttaatcaaaatcgaaccgtttttgattctgatgtatgtgctgccatcaagggtttgcatggataacccatcggtaaaaaatccacctatagctttcggcacagagcatataccaggaataaacatcgcatcagataaatcatgcaacctaaaatctaaaggcgttgatgcgctgccgttttgccaccatccgtcaatgcaacgctcagaaaatatggctattccctcatcgcctgctttaagtggaaatgtcactgcaaagccaccgccacgaggaaagctcacgggtacatcaagaagaggcggtatatctgccccactcccatcgactaactgcatttttatttgtatcgcaagtgatacggtttgcttggctgggtcaaaactcacgacttttgcaggaagtgcggtatgtaaattcagttggttttgttggatttgatggtctgttgcggtttctggcgtagctaagatttgtgcgtagttcatttgttcttatccttgctttgtttatttgatgtctgactgcccttttctttttccactttttggaattttcccccgacaactgttattttgctatgccaatccccaccgatgccatcgccagaatgcgcaagttttacaatcttgtactccccattgaagtactcaatgatagattcaactttcacaagtccgccaatttgtaatgcagggttgagtaaacaagtcagctctaatccctcatcggtttgttctggtgcattaatcattcctgtatcttgagaaattagtacagcgtcatcatttagcactttatcttttggcaagaaaataagcgcgccatcttggatagaccaatcagccttgttattgcgtgcaattttgttgagaatatctcgactattgccgtttaatactctacccccgagggagtttccgttgattagggatnnnnncattccattcattaattaattaatgaatgaatgnnnnntcgtcttttgcattcttcaacaatctgtttgtctgtcgcccctgcttttwatgtcgttttagctctcgactgagtataggcttgatgcccatctgaacactcaagcgtaagaacaaaatccaatccctctcgttggattctcgtcttggtaatatctcccacataaatttggcgtaactcgccataaccaaccgataaggcgactttcttatagtcttggcttaataattggttgatatggtctcgatttaagttccacacttggattttagcgggattaggcttttcattgatggttttatcaatttcaaacgcaacacgtaattgctcaatgcttaacgtttcttggtcgttactaatgtccagtttccaacgtctgccaaattgtttcattgtctctccttgcgttatttagcaaactcaataaggacattcgccaacggtgtaatacataaagcaaacaagccaagcgcaacgataacaatagagaatgcgattgcacctcgcataatcggacttgcatttgtttccatttctaacccctcttttaagtgtatttttaacttagttttgctatacttactcaaaatttgttccttctttattgggaaagttggaataaaaaaccccgatagtgaccagctatcggggttatttttatctattaatttacgatgccttttcgcctatatacaaaaagcatcgagtgcctaaatcttccatactcattgggtctaattcagcaccgctttcatcgtccaaatagaagaaataaggctgtgtagtgcgagccaataatggtactccgcacgcgatcgcatgacctcggcaaatctgtttttggtttactgactcaaatacatccattgcccaaaactgtccaatactattaaatcgcaaggttaagcggatttttatgccgttaaattcaaaggtttgttcctgataaggatgttgtgttaatggaattttaagcatacgtcttaccatttaaaaagattgaaaagcgaggaggttcttttaggtgtatcgttctttggttgagtagagccttgctgcgattttgttacagattgaatcgatgatcgaccacttttactcttgcccgatgcagatgatttagattgagctgtttgtgtctcaacaataaatatctcacgagccgttatcgtaaatgttgcactgccatcttgtgattgattgacggctacagattggattagcatgtttttgtacaagttaatgcctgtctgtatgtcaatggtttcccctgatttctggcaagcaacaaggtcggcatagcatttttgcactctactatcccctgcactgctatcaagcaatccgcctagaccaaaatcaggcaaaaaaggggcgatggttcgtgcttgattaagggtgcgcttcgcttgactatacgcccctgcaacttggctaatcactctacccgcttttgcgatagattgcgatgtttgagtgataaccttaactggcaaaggaaagttattaagaaagtctatcccgccacgaatattgccgataaacggaaggtctaaaccaaaagtcgaatggtcgtgatcaaccattacaccattaatggtaacttgtttaggctgaataaccgcatggtcagcaatggcagcccctgattcaatcgggttttctgtaatagataaatccgactgatggtcttctgttgtaaccacatcgaacgttattgtgccaatactacgattggatacttgagcaaaatttaacatagaggttaccccacaacaggtgaaagttgattattgatcgctcgagccgattggtctgccactgcttttggattatctgtgccttggatgtgttgcgtaatggtaattttgttattgctgttagtcacacgattatctgcatttgaggtttgagatttcgcccctactgcggcaacttgtggtgcagaagtataagatggatcaaacatcattgtgtcataggctttcgtattttgacttgccgttcctaccttttcaccactatcactaaaccacccttttactgtatcaacaatcggtgcgatatattggtcgtaataacccttaacccaatcaaatgcactttggaatggctttttaatccagtctgtaacttgagcaaacttggtctcgataacatccaaatctaactgttcgccagtaaataaattccacaaaccaacaacaagcgcaagcccaagtttaaatggcaactcaagcatatctgtaatgagagataatgtttcgccaattggatcgacgctaaagttatcaacaaaatttttccaagtggatttaacccacaataacgctgttttaaatggcttccaaaattcacctaatgcagtttcgccgccttcaagataagtgataaagtcatcaacaagcaaaaacaaggctgcaattgccgttataatcaatgtgacagggttggtagcgaaagctaataacattctgcgactaaaccacaataatgtcgcacctaatgcgtagattaagtttttccacccaatagtatgctcaacaacattatcgatggctgcggctaactcaaacaagaatgaaagaatttttccaaagccgttaagtgttgctttgataaaagcattattctcggtgaaccattttgtaaaccgctcagctaatcgctgaatggatggtgcaacacggagtgagacatattcgccaatagctctaaaagcctgagaaacctgagtcagcgcatctttaaaagccgcggcggtttttgcattttctgcattacccacaccaagcgtgagcacacttgcaagggcaatttgttctttcagttcatcattaccaaggcgcaaggtttgaatcatcgaactatcaataccgagtttcgcaagcatcgcaatttgctcttgctcccccattgctttcatcttgtccgagatttcacccagcatttcgcttgaggtttttacctctccattcgcctttttggcgcttagtccatattgctcaaatgatttcgctcctcgaccaattcctgctgcagcttcgccaatgacgcgagataatccttcaatagatgattgtgccgcctgtgcggatgagccattgacctctgcaaccttacctaagttgtaaatttggtcggctgattcgcccgtgacagccgagagttgtttaatttcatcgagtgcatcgagattagcatcaacaaaattctttaccccgattgtggcagcgtaaaaagctgcaccaaatgccgcaactttaagtgtagttttattgatactaatgccaagcaattcaaatttattcagtaatccgactgcaccatattgggttgcccacaagtcgatgatattgtcagataaattttccgtgcttttggcgttatcttctacggcttttgtatctttttcggtagcatcggttttctgctcaatcgcagatttgagtttgccaataactttttcaacctgctctgcacttaatcccgcttcttgtaactctttcgagagctgttcggtgttttgaagaaaactctcaccaaactcagataagagcttatccccctcgatgagtttttgtacccacgcatctaaggcatcatcttcagaaagattttctgtttcagattgtagtttttcaagggaatcaaaaaaactttcaaactcaggtgcggctttaatttgttctgttgcatcatcaacggcacgttcaagagcttcagcaaaagtaccaagattttccgccgcactttccgtgccgtctccaattgcattgaggaattgctcaaactgttgcattgcttggctatccgcatcaatgccgattttaatcagtagttcatcgagtagcattgcgttgctccatttgatttaattcaacaatgacttcgtgaaaagataaaaggtcggctaacgaataaaccgaccttaattcgtgtagtgaacaaaagttttttacaataggcgtaaaaataaaccagtcggctttactgtctaactggcttatttcttcgcttttagattggcttgaatattgctcagcaatccgcccccaccgataaaaaaatcagcgaattgatacatcaacccttcttttaatacggggattaaatgtccacggtgttggttgaaatgactatcaaaacgttcagataatcggtatagtttgccatcttgctcgcatgaggtatgtttaagcacgatatcttcaagctctttaatacttgggtcgcctaaattcgccaatacagtcgtcaatacgcttgcaccgagttttttattgttacctaatgatgataaatcgactgattgcaataatttcattgcatttttgagtgcagtccatgctgtcatagcattagctggcgtcatcgtataggcgacattttcaatattgatttgtttgctttccattattgaacacctttttcaagattcattgtcattttctcgaacacaatcgtccatgttgtcgcattgtgcccattttcacgcatataagctgcaggtgtagtaaattgattaagtcgcggatagcgagtgtcatcggtaaataggttttaatactggttttttgttgattaaacaacttagataaataggcgttatcctcagaatgttgtttaatttttagggttaatttgcctgattggtcagggtttgcgataaatacgcccgtgccatttgcgccaataaccatttgccccgcatcaacttggttggtcgcattaatcacatctgagccgtctgcccagtcactcatttctttgccgtctaataacacgacaacttgttttggatcgaaaactgccatagtttttcctctagtagaataaagccaagaattcctccttggcttttgaattatcggttatagttcacaatcacatcgctagaatgaattgcgcctgctaatttcactgcggtttgaattggagttgcgcggcgttgctctcggtcgctatcagatagcgtatccattggtgccgcccatacatagtaacccttttccagataatcacctgtcgtcaagttaccaaagctatcgcccgtccattgaccaggtgcaaaagccccattgtttacaccctctaaacaaactttctccacggcagcaattaataccgcttggcccttgtctgttaatgggattttggtcggtgatttatacaagcgagcgaatacctctttttgcactgcatcggtaaaccagtctaagataacgatttcatctgcaaatttaccacccattactgtgccttcagcaatcattgcgacatcatcaaaataagtgtacacgttaatgcctaagcgtttagccttagagaactccgttgccgtaatttcatcagccgtaatagttggttgttgcttgaatttaagcgttaaggttgaattatttgccgcaaagttcgttgataataaacgagccaatgcagaagatgctgggtacatatcgtttttatcgaacatcgctaatgtgtgatctaaacctgcatcatataatttcttatagatgttatcagcagaccattcaagttgttcaacacgaataacatttgcaccaaacattttggtattagcttgcgcgtattttgctgcagattccacttcgctatccgtaagctgtgtggcaaaggtaaagccataccacgcattattcacttcagctacgttaaataatgcttctgcaacggtttcttttttcaaagaaattgatgccttacctacttttcggcttgcttggccattttctaatttaagcaatgtgccaatatattcgccattgtcgtcgccattaaaggcgtaatggatttcggtcgctttatcttctccagcattgttagaagtaatgataaaacgctgccctacaccatcgtaagaaatagacaaagatgaggaaagtgcggtcaattttgcttggattttggtggcaatcgcattgaaatctgaggcgtcagcaaaagatagccccgtgacttttttaattgcagtgccaatggttaatgaaaattgaccatttacaaccgctttaaaacgatctaaatcatccgacaaggttgcaccgcttaatgtgttcttggttgcctcaatggttacaggggctttttgccagcgcgcaataattaattgtttcgcacgagggctttgagcaaaaaatggctgtgctgcttttgctgtttctgaatttgtgccgaataactgttctacatcacgttgattttcgacataaacataacgcgtcgtcgcatcagcaaatgcttgtcctgcctcaggcgtgaacaatgccactataccgaatgatttacgcgcggcagattttggcacagtatttaactgcacattgacaatctgcgagatagataatgccataaggctatcctcctatttgttgaattaaatggtttgtgcgttgttcaacgttttctatcggatctagaggtgtatcaacaatgtgatgatggctaaatacaacatcaaactgtcctcgttcttcataatctgccccaacggtagccgttaaattgcgaatatctgaaaaacgaatcacaccccagtgatttgatttgagaaaagaaagaaacgctgaactttggaaaatggcttttagcttgtaacactgcgcaagggaatttcgaccgaaacaagagagactcacggtgctttgcattgactgaatgatacgctcacgtttgccgtcaaattctctcgtagcctgcccgatttcattactcgtcatcaaatccacggtaataaaagcaggcaaaggattttcagggagccaaccgccaataacggcaccattaggtaactgcaaagcctgttgaatccactttcgcagtttggctgtgtctaacgccgatattgttgtggtatccatatttcccccaatttgctacggtttttattttgtaggtttccccctcataaataactaaatcacctatttttaacggcttaatggtgtagattttgattgaggggataaaacgctcaccttctggcaataacaactcatcattaggagaggtcggcataacaatggcagtcacgttttcatctgtataactcgccccgaacccatcagatgaatgctcaccttgcagatgttttacagtgacaatttggcgaaatttgctattcagaaagcgaggatattggttaattaaactcatttaacgataccttttacagattgacgcattttgcctgtatcaatcaatggtttgctagagcctttttgtttgattgtacttttagcgttggcaacccagttaccacgagcaatatttaactggacatcaccttatgcaactactgctagttgctcgtaaatcctctcaatttgcaagccttgcttaaataattgcgtgaaaagtgcggtgtatttcccttgatttttagacaaggtttgacgcaagaaagggcgtgatgggatgtgctcattaccaaattccaacacagccgccaaagaggagaggttaaaattcttagccccctctaatggttcatcaaattcagcaggaaatccaatataaaccgccttgtctttatcagcccttaatcgctcaattaacccttttgcttgtgctaaattccccgtgatttgtactgccatttacgccaccattaccccaatgccaaccaatttacgtaatcgcaaatactcttgaccatacgctgttaattgataatccgcatcggtgcctgtcagtgttggcacggcataactaacagataactcgccagcactttcactagcgagatttcgatttgccccaccgccaccttcggttgtccaaagtgacaaacgtaatagatgagcagtcaatgccaacacgccacgttggtagagttttccccaacgagattgacttacttccatctgcatccgataaaaaaaggtcgattttttcataatcgacctctttaaactcaggataacgctcaaggaatgtatccgtttcaaatgttggcataatgactccctagtaatctacgtagagtgcagaatttggctccataaaggttacgccaccaaacgccatacgtaagccagattcataagctaataagcctttttgttgagcagctaacacagttggcgacattggcacatcaaagataacgtgctctttgctgttcacataaaccattgcacgagttttgccacttgttacacgagtaccaaagtttgacggcaaggctttaattgtaacgtcacgacccgcagcagcagacaggctcttagtcaagaactctaatgcggttgtatcggtgttattgcgttgcgttaaagctaaatgcgctaaatcaagtgaatcaattgcaaaggtatttggtgcttcaatgcgtttggttttttccatgcctgcaaggaacatttctttgaaaaatgccactgatttgtcaaaatccatcgcttgtactttggtatttgcggaagtgcctttgatgctgtgcacctcaacagatttattgtttagcaagccagttaatcgagagtctttcgcatgacctaaaaaagcaactttttgtaaggtttgttgtgcgtttttgtttaacgccatgattttagcggtatctaacgctaaccctaacagcttgccttgttcaagctctggtgttgcccatgttaccgatttagcccattgtacgatataagagcgagttggcgtaaagccgacttctacttggtctaatgtgcttgtgccagtggtaattaaaccatcatcaagcgaaccgtgctcatctgcaccatagtgaagtttttctgtaatgccgacagcggcttgttgatccacataaacaaattgcgggaacacaatttcaggatatttggtttctgaaatttctttgctcacagccgttaagccgttttgtacataagttaataatgacattcatcccccttataattttgtaatcatcgctaattgacccttaacgtcaatcacggtgtagcttgtttcaatcgcatttgtatcggtttccccttggattgcaccagttttaccttcgccacccgtcgttaatacaaatactttactaccacgagataccgttttttctgatgcaatattgacccaaatcgcatcgcctgtaccaatgtgcatcacatcgactaattcgccttcagaccattcatcgcgaattctgcttgataacaccacgccagccaatacatctgttttagcggataaggctttcacaccacctgtgggatttaatgctacaaagtcaccagcttttactttgcccgtgactttttctgctgtggtttttgcgtttgcaagattacccttgcctaactcgcctgcacgcgcaggcgcttgttcgtaagcataactcatctaattactctcctaactgttgtaagttttgttgaaatctatttttggtgcagctttaggctccgcatcaccaagcaaaatactgccgagcgatttacgttcatccgctaatttcgccacaaccgcttttgctgtttgatatgcacctgaaatttcctaatcggataatttggctgcctcatctttagtaaaaatgccctgcgcaactaccgcactttcttggatttcacgcacagtcgcgttatccgcaaaattgacttctttaaatgcagttttagcatcagctaacacggcagcttgttttacttctgcgtcacgttttgcttgtgcatcttttagctgttgaatttctgcatctttggctttaagttgtttttcaaactcttctttattcacttcttcatcctttttatcttcgggtttagattgtttttcttttggttcggttggttgttcgccttttggctctttaccttctttactaccagacttttcttcgtcctcaatttgttttttctgttcgtccgacaacttgatgccgaacgcacctaaaaacgcatcgagaatttttgcggttttccccataatggttttatcctcatcggcaagttttacacttccaccgcagcgaccctttgccacaatcgctacgtggttaccgatcatcggcgacatctcaaaatctgcatcttgtaccgtggatggcttaatatcgcagtcataaccacaagataattgttccacaccgtgctcctgtacggttttaatggcttgttcatcataaatccaagcctcggctgtgagttcatcgcccactcgcttaacattacgcacgacaccgacagagagctgtttccagttcttcgcattcaccccatctttagggtgtcctacagttaatgtggcattttcaaaactcttaatcgtttcatcgctaaacaacgatttctctgtgcgagcgacctttttaatgctgtcttcttttaaacctagttctgtagcgaggtaatcaaataccccaacttttggggtgattgctggcacaactaaaaaaccatctttagtgatggttctttgtgtagctgcttgagttgttttgtctgtaaatttcatttatttaccccaataaaaaacccgaccatttctgatcgggttgtttgaatagctgaatttaatttagagccatcatttgatggtaagcattacgcttgctttctcgcaaggattgtatttctgacttcgtcaggtgtcttacgtgaattaatgatgaatcttgcttcccattctgtaaaccgcgagaagtcgtagccaaattcttttttccaccaactttcaagttcgccatatttactccgtaattctgctaatgtgtgtttagatagccttaattgtacagaatattgtttgccggttaaagcataagatgcaataacttttcctttattctcctcaatatagccttttagactagccaatgtaccgccttgtgtttgtgtgtcatctaaaataatagcatatttatcttttggaactatgccatcaaaagctggagaataaaccaatcgatgccatccatctcccccagttctagatacttttgttgcttgaacaattgataaatcaacaggaatatggagttttttagataatacagtagcaatagctacaggaatcatattttgaccaacggcttcttctgcatgaacaggaattagaattgcatttttattgccaaccaattgcttcaatttatttaccgcatcatctgtaactaaatctttagcaagttgataagcatcttcaatactaccctttttagcattttcatatagcggatgtgatgttgcatctcctaatttcctatcaatgatagtatcagggaaatcatcagaccattctgagcgcatttgttgtttttcctgttggctaactattgggctatttttcactatctgctcgttattatcaagcactggaatctgaacacaccgacaattaaaatcatgcccaggatgaccagtatcagcagggggatttgaatattcaaaaatctgcccatctttttccgcatggctttcgcgtacacgctcatcaagcgatgctgaccacatatatttttttatacctacatcttcatgtctcgcttgcgttaaggcggcatttaattttgaggactggtctcgcgcaataaacatcgctcgtttttcggttgttttacccaagtcttttatttgtgctgcaaggtctttatttaaagaaccccgaaccatcgcttgcatgacggcattttgcaccttatcaagatattgtgcgcgaatagacttaattaactggatattaccagcggtcaatgcattcactctttcagcaatatttggactattgcgtaaataggcggataaatcgataccagtttggtttttcaaattggttgatacttcagcatggttttgtgcatcaccacgaccaacgaagccattggcgatattttcagcttgagaagtgcggtcagatttttcgtacttttctaatactttcatcaacgctttcgcactaatcgcttggaaccctttcgcatcatccataaaaaaagagccttgcggttgttgcatggctatttctacatcatcggtcattgttttgacgaactgcttaagctgttgtctataccaaagctccgttctcttgctcatcttcactggcttgaacttgcgtgctttcgccctctggttcttcaaaatttccggcaagttcatcagcatttttcatttcctcaatgtcatcagcagagatattggcaaataaaccactttctcggagttcgtttgccacttgatattcatttactacgccattttgaattaacgtatttgccgctgtagcaaaggtattaagcatattaacttgttgctcttgtttaaccaccgtcaatggtaaaaattcaaaccaccagtcatcaggttgcccaccaaataattcattgcatagcagtgtatcaagcacttcaagcacaggacgcaatcttgtctcttgtaatcgatgaatagattcgtgatagttttgaatatcctcatctccacttgccaatcccgaaacagattgcccaaacaaaatggtgactggcatatctgccgcacctgccaccgcattgcgaaactctgtcagtaaatcttttaacccaccgaaggatagctcttttcggtcgtactcattttccgcatcaagcaacagactattggttgctgatttaatcgactgcaccgctgaaataacgtgagccacatcattttctaagccagctgaaatcttgtcagataaccctgcaattttgaaaatatcgattttactttcaaaaataaggtcgccgacattcgctgaggcactatcaaagcgtttaagtacatcaataatcttttcaaggtctgatacaccccaaatatcgttatcagataatggcgcatcattggcattgatgattaataagcgtgaatgatgcactgaaacagattgtgtgccgccagtaatggtatattcactgtatcgaccaaagtttggcgaaaatacatcgtcatctcgttgccctgtgggtgagattttccatttaggtaagataatcaaccgctttaatcgttctgtaggctgcaatggcgaagtgatgttaattgtgtcagtaacaaccaataaacccactgccccatacaaactagaccattgcaacgctttagttaatgtctcacgcagttttaatctacgctcgagcttagtgaactcgtctagctgttcagattttaagtcattcgagaaaatatcacgccagttacgcaccatatcttccgagcgtttaatacaaaccttatttgcaatccagttatcacgccataatgcttcgatttgcattaagtcatcggttaaactaagcccacgagcataatatgtctggtcttgtttgctacctaactttagcgcaagtgatttgatgccatctaaaatattcatcttataaatccagtagtgatttaggttttgtcggggcgtagcacatgactaaagcatccgccatatttggagaaggtatgccacgttttttcatatcctttttgctttcaacctttacccgcccgttattgtcataatcaacacgaggacgtgataattctgctttcaaatactcaagctctttgattttgctcgataggcttatcagttcatcgtcaggataaacatccccatactttactgctcgataggttttatagaatctatctcgcaacgcccaccaagattgggttttaatgttcgaaaacatatcttgattctttttgcctttgatatattcacgctcgggataagcaactgcaccaccagcattaaatccttccacttgtaaagattttggcaagcgtttaaagtgagcttttactcccgcccccacaccaatactatcgaatataatcaaatcagctttaaatttgaccgcactttgatttgttcggttggcggaatcaattacatagccattcttccaaacttcaatgtcaagcaccacagaaccgtgaacaaatgcattagcgttactatccgcaccctcatcagccacatcaaagccaactttcttcattcctttagtagtaaaaccaagtttgagatgcgcatccaccgcagattcaatccatacaggcttaataatggctaaatcggaatcagccacaggctcgccctcataaacgtgacgataaagctcgtaatcacgctcacgcatctgctccatatcttccattaattctttcggaaaatatgggttgtcttgccaattcactaagaccgatttacaccgctcaggcggatgaatcacaaaacgctgataggtatcatcaagaatattcttcgggttaaagctcacaataatctgcgaaccgtcttcacgaattgttggaatcaatatatcccaactttcttttgaaacattctcgccttcttctacccaaactacatcaatgcccgtcatcgacttaatcgaagtaatgttagttttcagccccgcaaacgtgaagcgtgaaccgttttgctcgataatttgcgttttctgaacatcgaaaaaatcttgcagacctaacatttcaacttggtctgccaacatctgaatcacagaatcagaaatcgatttctgaatttcacgacaacacaaaactcgaacaggcgattgataggctcgcaatactaatgctctagcgatactaaaacttttacctgaacctcgcccaccgtagaaaataataaaccgccaaatagattcaaagagcggtcggaatttcgtaggaaattgaatattaagctggctcatcgctaaatgtcacattaatcacagtaggtaatggcttgccatcggttgttacatcaactttattggtaaacatccctaaatgcttcccaagcaattcaagggctttatttgcacctgtcggttcaaaaacgaaacattcggtattaacgctttgtgccgttccttcttgagcattttttaccacagtggtaatagtaagtggctttcttcccatacaaatatcacgatactcttgcaagtccgcaatgatattatctagggtaagattatggcgttgtcggtgctcttgttgaagcacatcaacccttgatctaatcttgatcttatctaattcttttttagctaatcggtttatactttcggacttcatatcttggcaatcataactctgccgatatgcttcactggcattccccagctcaatataaagctggcaaaatttttcttgtttaggtgttaatccacgaccagacgtagattttcctttcacgtctgacatagaaaatccttaaaataacttgtaaaaacttataaatcttataaaatgctcttcataaacaattggtcttgttactatgaaagaactcatctaccaaccaaaagcattaaagcaattaagaaaaatcccgagcaaagcccacattattgagaaatgcgaaatgctcaaaaattttcctgattgcactaacattaaggcattaacaaaccatacttacgaatatcgttaccgtgttggtgattatcgtgttttctttaatatcgttggcaatacgatgaatatcgtatctattgaagaggttaaaaaaagagatgaacgcacttactaatatccaatatatcaataatgagcaaggcgtacctgcttttgctgttatgccaattgctacgcttaactggctaaaagaaaaagctaatttttcagaccctattgaaacaggtatccctgaatctgtcgccaaattagctttattgaacgattattctgcattgcgtgcttggcgtgaacacttaggtttaacacaagcggaagtggcaagccgtttaggcatttctcaagctgcttattcacaacacgaaaattcacagaccttgcgtaaaagcactcgcattaaaatagcgacagcacttggcattaatcccgctcaattagatttttaacctatttaccgccttttgcttgattaatccacttattgagatgatctacttggcttgcacacttgtctcgctctgcggttaccttaacaagctgtatgactacatcgccgtatgtttccccagtaaatgctgttttgacacaaggtgcggtatagatttgaggcgggtaaatatattctgctttagtcgtgattttatttgtgcaagcggtcaagaacagactgaggcagacgagtgtgagcgcaaggttgtgtcttaatgattgttttaactgattcagcatgttctattgccatcctttctatttcattattacgctcttgttgctcaataacggcataacgctcttgttgtaacgcaagacttaatgatttgttagcatcttcttgttgctggatagtattttcttgttgttttgtcgttatttccaactcatctataacgctagattggtaacgcaatgcaccaatcaaaaccacgacaacacccgctaacgccatgtaaatgtacttagtcattatccgttaccattaatgctcgatagagcttgcaacgctcatcaatgccatttagtccaccattaattcttcgcgtgactttttcgacagaattaagctcagccaactcatagcatttccaataccacactgcagttttaacagataaatctaaattccctgccacatcgtctggctcaatatctctacctaaccattttctaaatgcggcataattatccttacctgtaatctgaatcagtccacgaccacgatacttccaaccatctccacttttctcatcgccattacccaaacgattagcataaacacgattggcaataagttcaggtttgcgctcatatttcttcgctgtaagagggtctgggaaatatttacggaaagttttagaaagcccaagccaagaataatttaaattttctttaaatcttgtaaatccgccactttcatgtccacattgagctaaaaacatcgcttgctgcatcttattcacacaacccgctttttctatactgtgccgaaatagcttgataaacacctttaactgcgtgtggaaaaattttattaaatgtcacttcggaaatcatcattgtcatctttttcaattctccgattaatgaatttaaataaaaactcgcgaattttttcagtaccaacaaaaccaatcatcgtaccgagaaatgaagaatattctgtatgcccaaataaatgcgtacaaattggcaccgcaacacccgcaatagaggcacacatagccgcatcaattaaaacataacgaatagctggctttttacgcataaacccaaatcttaaaagagaaataaataacgcccaaaaagcactctgtgctgagctagaactaagatttgtttgcaaccaagaccatattaacgcccacacatcaggctctttaattggcatatattttctcccgcctgttctttaggcaataaaaaagccccgaccgtttccgatcagggctgtaaaattctttcttgcgtttgctatgcgctaaaaccgcaatatagtacatataatacacttttagtgtgcactgtcaagcggtttatgaagtgcggtaattagtgatgacgtgtcgcaaatatacccatcgcaatcttggtttaaattgagttcgtatgctgcccataacaacgccaccgcaaagagaattctgaacataatttatcttttttcgtgaatttgaggtgtaaaaatccgccacacggtaaagtgcggtcggatttttcgttgttttatagaatttctaactgaaagcctgttgctttagggttgtaggctcgaagatattttaatacgcgccagttattaccttgctcgcattcaaattgctctgtaatgcgtgtcaatacgttatgggcttgacggagattacttcgatattcgtaagcaatgtcatgaacggatgcagcgtagtgcgaaccaatttgttttaatgccgggtgaagtacttggcaaagttccgtgccacgcaataaagcaaaccatgcccaaacaagctgttgaaggtcatgttctgtaaattcacgggtaaatttcttttcaggttctgacaaggcgagctgttgtggttgaagttgatattttcctgttttacgaatttgcgggagaacttcttcaaatacccacgcctcgaatggttcggcttctggtttacgggatttgatgatcagacgataaagattnnnnncattccattcattaattaattaatgaatgaatgnnnnngaattaaaattttgagattcacatcccagaaaatccgctttcaaaactagcaagattagttgcaaggataatcaaaaagtttacttaagtcagtgactttcatcacaaattttaaacaatttggttaaagaaactctctcggcggaagcacagacggaagcccaacggtgctaagcggtcgttagattgaaagccctaacctacttagttaagagtgagttttaaagtctgcccatgcaaagccagtgaaaaacggtgcagttgccgaaagtggagctcaagcaggcgaatatcccaatgtggatatttcaaaacacatttgctagtacagagacacaacggcatgtgaaaccgttgcgaatgatagatgaagtgtgttttgaaatggcagacaaacgaggaatgctacaatggaaaaattagaaattaaagtgtaatcacagccctattctagacaaaatcagcatagactgattgcactactccactgaccgctcgaaagggcggtatttttttaaacatttgacaccgcccccacttcagattaggataaacccacttccaagctgtcttttgacagcttttttttatacccaaatttcaaggatgctacaaatgaacagatacgaagctctcggacgttatgtagaagcgaaagaaaagttagatcgcttaaagcgcaaaagagatatcacaacaactcaattagaaaaagcctttagcggattaaagtacatcaacaatttcagctttgaaccacaatccgacatacaatttgcaacacaagacattgaaacgttacttgaacgctataaagcacttaacaatgacattacagccttagtaatagaaagcaatcaatatgccgaactgtgcgataaaccacaaattgaaataaaataaattgacacccaccgcccaatcatttaggatattctcactttcaacagagagtcgggaattggcgttcctgaattgattagggcggtatagatagcacgctcaaatgcgtgttttttatagtcgcaaaacagcaaatctacctttttgataaatttatcaaaaagtccaatgatgaactgtttaggaggatcgaaagatccgccgtttctctttgtcacggtactgcgaatcctattcagttcatcaccaactattcgcagtggttcgtgatgagttttaaaacttacttaagagaatcacaaaatgacacatttaaatcttatccctgtttttaacggattaatccaaaatcaacctgttcaactttgcaacgctcgtgaacttcacgcattcctagaaatacaaactcgttacaatgactggatcaaaaaccgcatcaacgaatatggattcatccaagatgaagactacctcgtcattaccgaacgcaccaatggacgcccacgcaaggaatatcacatcaccctcgatatgggcaaagaactcagaaattaattgcaccatttaaagcgtctaatcaaattaactgggaaagagcgaaaaacctcatcgcccaataaaacaccacaaaatctgaccgcactttttttagcctgcggcggattctcacacctaaaatccgacaaaaggaacagaaaatgaacaaattaatcattacgctcgtgtgtgcatttgtggtgtatatggcacacgccctaaactttaatcaagactgtgacggcaaaatctgtcacaccgaacagacacaacaatattaacaaaccaccgctcttatgggcgattttttattggaggaaatatggaaccaattaaactttcgcagaaagccgaagaggaaattgtgaatgcggcaagaatggcagcgttatccaatttgactgaaaaaagccaaaatttaattacgcttgaggatatcgcaatatattttgggcgacactatcaaaccgttgccaagattatttcaaaactgcctaattttcccaaccccgttacggtcgattaacaaaattctcgcccacgctatatcgcaggcgaagttgttcgttgggggcggatcaatgctaaacgtattagctaatcaagtaattccgccacctccgccatatcaggggcataatagacattttgtaaaatcgaaatatctctgtgcccagatattttggctaatgtcatcacatctacttttttagatagtctagttaatgcctcacgccgtgtgtcgtgaaaatgcaaatattctcgctcggcaagttttttgagttttcggaatgttgcattggcgtaatcgatgcataaaaatacttaaaaaatggcaatatttgaggttggaattaatgaggggtttatggctgatgtgaacgtaacgtattgattttactggttgaaatgcataaaagaaaaacccctgaccaacggtcaagggtttgtatgtggtgcctagggtcggactcgaaccgacacgtttattcaacggcggattttgaatccgctgcgtctaccaatttcgccacccaggcttaatggggttgaattatacgtatatataagaatgtgacaagcaaaatttattggaaataatccatttgttttaaaaataagcaagaattttctgttttctaaaaatatcgccaaacaaatgcaataattaaaatgcacaacataattaaaatttgagctaaacgtttttttgttaatttttcagctgccataatgctttactcttcttaatctgactaattagtggtagaatatttgcgttagatcaattttacactatttttttttcaatatttgaggcgtacatgaaaaatttcgttgcaggagctcaatcagggcgcaaaattcaatcaggcggttgtgcgattcattgtcaggattgcagtattagtcagctttgtattccttttaccttaaatgaacaagaattagatcagcttgataatatcatagagagaaaaaaaccgattcaaaagtctcaagtattgtttaaagcaggagattctctcaattcaatttatgctattcgttcaggcacaataaaaagctatacgattagtgaatctggcgaagaacaaattacttcatttcatttgcccggtgacctagttggttttgatgccattactcaaatgcaacaccctagttttgcgcaagctctagaaacggctatggtatgtgaaattccttttgatattttagatgatttggcaggaaaaatgccaaaactacgccagcaaattttacgtttgatgagcagtgaaattaaaagtgatcaagagatgattttattgctatctaaaatgaatgcagaagaacgtttggctgcttttattcataatctttctaaacgctattctgctcgaggtttttcagcaaaagaatttcgtttaacaatgacacgtggcgatattggtaattatctaggtttaacagtagaaaccatcagccgcttattaggtcgctttcaaaaactcggcgtgattagcgtacaaggcaaatatattacaatcaatgatttaaatggtttaattgaattaactggtacgaataaaacaaaaattacattagttaaataaatttaaggcgtgaatatcacgcctttttgtgcttgataaaaataaatttatccaaattaatcttgtaccttgccatttttgctattcttttttatcctatgcctcaattttggaggctattatgaaatttaaaaatattctcgttgtacttaatcccagtaatgaaaaacagtacgccctagctcgtgcagtgcgtttagttgaagaacaaaaaaatgaaactaaggtaaaaatcaccgcacttttatcagtctatgatttatcttatgaaatgtcagctttactttcttctgaagaacgttcagaaatgcatcaacaagtaatagaaaaacaccgtcacgctgttcaatattacttagataaatatgcaaatccagaaattgaattacaatctcatattgtgtggaatagcaatgaagctgatgcaattaacgaagaagtagaaaataataattacgatctagtcgtaaaatataccaaagacgaagaaaaacttacgtctctaatctttactcccattgattggcaacttcttcgtaaatgccctattcctgtcttaatggttcgtgatggcgattggaaacatcaacgccgtattcttgtggctgttaatgtatctggagaacaagaatatcaagatgaatttaatcaagagctggtagaaactggtatttcactcgcggaaaatctaaatcgtggtaatgtccatttggtggcagcctacccttccgcgccaattaatatggcgattgatttgcctgaatttaatacttcaggttatgaaaacggtattcgaggtcagcatctcattaatatgaaagcgttacgtcagaagtttgggattgatgaagatcatactcacgtacgcgaaggtttcccagaggaagttattcctgaagtggcgaaagaaattgaagctgaattagtgattttaggcacagtgggacgcacaggtttatctgccgccattattaggcaatactgcagaacatgtaattagnnnnncattccattcattaattaattaatgaatgaatgnnnnntattatcgtgaaagaatcttgaagcaagtacaggggtcatcgtgaaccacaaggtttttcaggtaaaacagatagtcaaggacgtgtgaatatcattccattaattgatggtatttggaaaattaaagttattcataaaacaccatttgcagatcaacaaacttgtcagcaatctgcaagctatagcacattaattttaccggttggtaaaggattggctaaactcccaccaaaaccagaacaccatcatcattaaccttgaaagtgcggtggaatttcaccgcacttttgcatcctaattaaataaaaaatacagaaatagtctgcctaaatcctaagttattcatctgcatatccagattttggcaagggtttcccatctaaatatgccaaattatctttaagtcttaaccgcccttcggtaaaccatttaatcacaagcggataaatttgatattcttgctcacgggttctagcttccacttcttctatgctatcttcggggaagattggcacttttgcttgtaagacaatcgcaccaccatctacttcttcattgacaaaatgaacggttgtgccgtgttcattgtcgcctgcttcaatcgcacgttggtaggtgtttaagcctgcgtatttaggaagaagagaaggatggatatttaaaattttcccagcaaaacgttgagtaaattttggggtaagaattttcatataaccagcaagaacgatcaaatctacggctaggctttgcaaataatcgccaatggcgtcgtccatttcgaggttattggcaaaatttttgcgaagaaagaccgcttgcggaatctgtgcttgtttggctcgaactaagccgtaagcatcagctttgttacttaccacacaaacaattttggcgggaatatcgcctaaatggcaggcatcaataatagtttgtaaatttgttccttgaccagaaataaggacggcaatttttttcattttcttccttatagaaatcagcccaaaagggatgaatttaaatttaagattttattattgaatctcaacctgtgcttcgccttcgccaagatgttcaattttgccgataacccacgctttttcgcccgcttgttcaagcaatgcaagagcggtttcaacctctttttctggtaatgaaattaccatacctacgccacagttaaaggtgcgatacatttcataacggctgatgttgcctttttcttgtaaccagttgaagatcgcaggccattgccagcttgattcatcaatcactgctttagtattgtcaggtaatacacgcgggatattttcccagaaaccaccacctgttaagtgagcaatggcgtgaacttcggtctgcttgatcaactgtaaaatcgattttacatagattttggttggtgctaaaaagtgttcgctaagtggtttaccttctaataaatccgttggatttgcaccacttacttcaagcactttgcgaattaacgaataaccgtttgagtgtgcaccgcttgagccgagtgcgataagcgtgtcgcctgttttcactgctgtgccgtcaataatctctgatttttctaccacgcctacgcagaaacctgccaaatcatagtcgccttcgtggtacattcctggcatttcagcggtttcgccaccgactaacgcacagccagacatttcgcaaccgtctgcaatacctttgatcacacttgctgccacatcaacgtctaatttccctgtagcatagtaatctaagaagaaaagcggttctgccccttgtacgattaagtcgtttacacacattgccactaaatcttgaccaatggtatcgtgttttttcaagtcaatcgcaaggcgtaattttgtgccaacgccatctgtaccagaaactaaaatcggctctttatatttggttggtaaagcacataatgcgccgaaaccacccaatccgctcatgacttcagagcggcgagtgcgttttacatcgcctttgatacgttcgactaattcatttccagcgtgaatatcaacgccagcatctttatagctcagttgtgtgttgctcacgattaacctcgatcaattgaaataaaaattgggcagattatatcatcaagcaaacgtttgcgatattgttaaattaattcatttaatgacatttttaaaattaaaatgaaattgcttgcaatcaaaacttatttgtactactttaatagtacaaataagctcaagatttaggagaaaaaatgaaaactactactgcattagttacaggtgcaaccgcaggctttggcttggcgatctgtaaaaaattaatcgaaacaggctataaagtgattggcacgggtagacgtgcagatcgattggcagaaatccattcacaattgggcaataattttctaccgcttgcctttgatattcgtgatgaacaagccacaattaacgctctaaatacccttcctgaaagttggcaagcggtcgatttattagtgaataacaacctgaacacgtgaacattaatcgtattgaagtaatgccaaccgctcaatcttttgcaggaatgagcgtttcaaaagaaaaataaaataataggaaaaaatatgtcagacacacttcttaacccttattttggcgaatttggcggaatgtatgtacccgaaattttagtgcctgttttaaagcaattagaacaagcctttgtggaggctcaaaatgatcctacattccaagcagaatttgttgatttactcaaaaattatgcgggcagaccgaccgcacttactctttgtcgtaacttaactaaaggtacaaaaactaaactttatcttaaacgtgaagatttattacacggtggtgcacacaaaaccaaccaggtgttagggcaaattttattggctaaacgtatgggcaaaacgcgtattattgccgaaacaggtgcgggtcagcacggtgttgcgaccgccctagcttgtgctatgttagatatgccgtgtcgtgtttatatgggtgcaaaagatgttgagcgtcaatcaccaaacgtgttccgtatgcgtttaatgggggctgaagtaattcctgtacaaaaaggctcttgttctttaaaagatgcctgttgtgaagcgatgcgtgattggtcagcaaactatgaaaccacccattatttacttggaaccgctgcaggccctcaccctttcccgacgattgtgagagaatttcaaaaaatgattggcgaagaaaccaaacgtcaaattctcgaacgggaaggtcgtttacctgatgctgtcattgctgctgttggcggtggttcgaatgcaattggtatgtttgctgattttattgatgaatcaaatgtgcgtttaattggtgttgagcctgcgggtaaaggtattgaaacgggcgaacacggtgcaccgctcaagcacggcacaacaggcatctacttcggaatgaaatcgccaattatgcaagataaagatggacaaattgaagaatcctactccatttctgcagggttagattttccctctgtcgggccgcaacatgcttatttaaatgagattggtcgtgctgattatgtatcgattaccgatgaagaagccctcaacgcattccaagaattggcaaaacatgaaggcattatccctgcattagaaagctcacacgccttggcttatgccttgaaattgattaaacaaaatcctgaaaaagaacaacttttagtggttaatctttcaggacgaggcgataaagatatttttaccgttgataaaattttgacagaaaaaggaatgaaataatgagccgttttgaaacgcaatttgcgacacttaacgcaaaaaatgaaggggctttcgtgccgttcgttaccctttgcgaccctactttcgaccactcttttgagatcatttgcacacttgtggataacggtgcagatgctttagaactcggttttcctttttccgatccgctactcgatggcccagttattcaagccgcgaataatcgtgctttaactgcaggtcatagcagtgaagatagctttaaactattggaaaaagtgcggtcaaaatatccagagattccgattagtttattactttgtgccaatttaatttttgctaaaggtttagatgctttttatcaacgttgtgcagaagttggtgttgatgctgtacttgtagcagatattccgttactggcaaaaggagattatgtacaaacagctaaaaaacacggtattcaacccgtctttatttgccctcctaatgcagatgaggaaactattcaaggcgtagcgaaaaatagcgaaggctatacctatttagtctcacgcgcaggcgtaaccagtgctgaaaatcaagctcacgcagcaaatttagatacccttgtagaacagcttaaagcccacaatgccccaccaattttacaaggcttcggcattgctcaaccagagcaagtgaaagaagcattgtctttgggcgctgcgggtgcaatttcaggttctgcaacggtgaaaattattgagcgaaatttagataatcacgagcaatgtttaactgaattagctgaatttgttcaaacgatgaaagctgcaacaaaataagcaaaaaagaacccgcacttgcgacgggtttcttttagctatcgagaaaattaaaaatttaatactttgtcagcttccatccaccataaggggatgaatggattataaatagaatattttgcatactcttctccttaatttcattaataaccttgctgataaattccttccaacaatttcactgaaagtaaggcgagattaaagcgttgttcatctgccacagaccaaaattctacgccattttctaccgcacttatttgacttaaatgaagttttactgattcttcgccattttcttgttctccattaagcacaggcgtaattaaggtttcttctaaagcgacaagctcgctattttgaggctgatagtcgaaatcataatctgaaagtgcggtgactttttgtgccaatccataaaatacaggtacttggattgcatgaaatgtagcacgctctaattgcggaaaaattcgttgtaattgattcgataaattaggtgcttgatacggataaacatcaaaggctaagcgcgtttcttcttcatccaatggaataccatttaataaacgggctgtttgtcccgcaagtttcgtcacggtttctgcatccgtataagaagccggcaataaagaggtgacaaacacttgattaagattcgtttcttgtaaaatcggggcaaggattaaagcaagttggcttacttgtggatcaggcaagctaacaatgttacgttgtctcaattcaagtaattgtgattcatttaccgttggaacaacaacaggcacatccgaaagtgcactacaaacgcctaacatatcaatgacaatacagccctgctctgctgcttgtgcaatatgggcaacttgatcaagttttcctgcaaaaaagacataattaaaatcagcccactctacttcatttggcgaaagttgttcaacgcctttattgcgaaaacgaatattttgctcttcttcaaaaggtgttatttcaacaatagaaatgttactaatttcaagcgtactttgttctaaacactctacaattttttcacttaattcaaattctgctgctatcgcaatatttaaggttgcgtccatttttctctccgctgtaaaataatcagcattattttacaccaaaaccaggaacgaaataatgacacctgcaattgatttacttaaaaaacaaaaaattccttttatcttgcacacttatgatcatgatccgaataatcaacattttggtgatgaggcggcagaaaaattaggcattgatcctaaccgctcttttaaaaccttacttgtggcggaaaatggcaatcagaaaaaactcgcttgttttgtgcttgcaacggccaatatgctgaatttaaagaaagcagcaaaatctatcggtgtgaaaaaagtggaaatggcggataaagatgcagcacaaaaaagtacaggctatcttgtggggggaattagcccgctaggtcaaaagaaacgcgtgaaaaccgtgataaattcaaccgcacttgagtttgaaacgatttatgtttcaggcggaaaacgtgggctaagcgtagaaattgcgccacaagatttagcaaaagtattaggtgcagaatttactgatattgttgatgaataagtgatggacttataaatttaaaggcggatttcttatttaatacgaactaaaaggactaagctttttttaatcacaaagcttagtcctttactgactttctaactttaattcttgtcttttaagttaggattaatagaaaaaaatttagggtatttattattcttgagtatccgcaattgggattatttttgtggcgtgagatcctttatcgctgtggagaacttcaaattgtactttttgacccgcttttaatgaacgatagccgtccatttcaatcactgaataatgtgcaaaaatatcggcatctacaccttctgcggaaatgaaaccaaatccttttgcattattgaaccattttacaataccaatttccataaaagacctctctaggcttcgcctattaaaacaataaatcaacaagactctcgccttattacctactaattaggttcgctatgtttaaatattttgaacggttatgcaacgagcaatattcaaaaatgataagtagatcacaaaaaatttaattttctggagtttttttatcatttttatgaatttctcgtagtgctttcgccactatttgaatcgcttctccactactaattccttttgccataagttcttgaatttgctcaactgctttttgttgctgttcgtgtgttaagttaatatcaaacattttcccatccaaattgattcattaattgctgccattgttcatctaaacctgctgtaattgttatttgctctttctttattggatgaataaaagacaaactattagaatgtaaaaataaccgagaaaagcctagatgaaacgttaatgcacgattttgatgtaagtcaccatattgcgtatcacctaaaattgggtgaaaaatatgtttcatatggcgacgtaattggtgttttctacctgtatgagggattaatttaactaaagaataacgcgccgtttgataacgcccagcaggataaggcatttcgactatttttaatccttcataatcagtcactgcttcttgaggctctttatcttcttgagaaaatttatctgcgattttatccaattgaatttttagtggataatctatccgctcttttccctgtagataccctcgcactacagccaaataagatttctgaacgcacttttgttcaaactgttcacacattaaattcgcaatttcactgctcaatgcaaataacaacacaccagatgtcggtcgatctaaacgatgaataggaaatacgtgctgaccaatctgatctcgcaaggtttgcatcacaaattgagtttcgtgaggatctaaccaactgcgatgaaccagcataccagcaggcttattcaccgctacgagaaactcatcttgatataaaatttctaacattggttcttgttcagaagttcttctaaagcaactaaaggaattaatagttgttgtaactcattaaattccttcattgcttcttcaatataaggcgaaatggcaattttatttggcaaggctgaaccactttctaacaatgcctgcatgcgtggaataaatacccactgtagccactcttcggcagacatcgtatcaattgaaaaaggttcttcacttaaaaacgcctctgcagcagggggcatcgtttgccataaattaagctgctgcatggtaatttgaagctgttcaagatgctgtttagtttgattacgcatattttatatcctaattaatgaatgttttttgcaaatacacgcacatttgaaaaaccattttctttcaaatataaggcttgtaatttactcatcacaccacgttcacaatacaacacgtaacttttactttgatcaaggctaccaaattgagaagaaagtttgtagaacggcatttgaatgacgtcatgtgtacctgattcaaatggattttcatccgtttcttctgggctgcgaatatccaaaatcacttcattttcacctaatacagaaattgcctcaacttccacgacttctttttctgtttcttctgcgatctggcgaatatctaaatatttcgcattttgtaccgcactttcaagaatctcaaaattaaaatgcccttcttctttaagaatcttttcacgaacagctttaatcgtaggattttttgaaatcacgccacaaaattcaggcatagattttgcaatatcgtcagtaccaatttctttcgccatcgcgataatttgttctttatcatgggtaattaacggacgtaatactaaggcatcagcggcttcatcaatcaagcgtaaattggttaaagtttggctagaaacttgccctaatgcctcccctgtcacaattgcttcaatattgaaacgttgagcgactttacttgcggctcgcaccatcatccgttttaatacaacacccatttgtccgttatcgactttctctaaaatctcaccgacaactccctcaaagttaatcgcaataaagcgtactttatgtgaagagctatagcgttgccaaatatgataagccatttgtttaacgccaatttcatgggctgcaccgccaagattaaagaaacaataatgaactcgggaaccacgacgaatcaacatataactcgatacgcctgaatcaaatccccctgaaattaaagaaagcacatcttcttgcgtaccaatcggataaccgccaatcccagcgtgacgtgctttaactaacatcattttgtcatcttcaatatcaatacgaacagtcacatctggatttttcaaccgcacttttgcactttcaatgtgttgatttaatccaccgccgatataacgttctgcttcaatcgaactaaatttatgttttcctttacgttttactcgaacacaaaaggttttgccttgaagttgttgtgcgacatcagcaagcgtcaattcaaaaatatgatgcaaatcggtaaatggtttttcttcaacttctaaaaaatgatgaataccaggaatacgttgtaacaaggcgattaattcttcacgattttcttcattttttgaccgcacttcaatgtaatcccagtgacgcacaactgcggtttcttcatcatatttctgtaaaatattgcggatattagaggttaaaatttttgcgaaacgtttacgcacagtttcgcttttaatcataatttcaggaaaaagtttaacgataaatttcatataaatagcttaggtatttcttgggtatttaaagtggcgagtattttacgcaaagatagtgaaaagtccactggtcctagcttgaaataaatttttaacaactcaagtaaaatacagtacaatggaaaacaatttttaccgtgaaaaaggataattccatggcgcgtaaacccgcatcttcacaagattttgaaacaacattagcgaagttagaaaatattgttacacatttagaaaatggcgatctaccgttagaagaagcgttaaaagaatttgaacaaggtgtgcaactcgctaagctaggacaagaacgtttacaacaagcagaacaacgtattcagatcttattgcaaaaaacagaagatgcgccactgaatgattataaagggaatgattatgaagggaatgcttaatgggtcacttttctgaagaattacaacaggttcaaattcgtatcaatcgctttttagaagctcaatttgagggcattgaaagtcataatgcacctttgcttgaggcgatgaaatacgcattattacttggcggtaagcgagttcgccctttcttagtttacgcaacaggtcaaatgcttggtgcagagaaacaaaccttagattacgctgctgctgccattgaagccattcacgcctattccttaattcacgatgatttacctgcgatggatgatgataatctacgccgtggacatcctacttgtcatatccaatttgatgaagctacagctattcttgcgggcgatgcgctgcaaagtttcgcatttgaaatattgaccaaaacaccgaatatttctgctgaacaaaaactggctttaattcaaattttagcgcaaggcgctggtgtgcaaggaatgtgtttagggcaaagtttagatcttatttctgagcataaacagattagtttaagcgaattagaattaattcatcgtaacaaaacgggtgcattgctaattgccgcattgaaattaggtttcatttgttctccgcattttaccgaccaaaggttagaacaatccttaacacaatatgcggaagccattggtttagcctttcaagttcaagacgatattttagatattgaaggcgatagtgcagaaattggcaaacaggtgggcgccgatcttgatttagataaaagtacatatccaaaattacttggattaagtggtgcaaaacaaaaagcgcaagatctatatcaaagtgctttgtctgaattagaaaaaattccttttgatacaaccgcacttcgtgcattagctgaattcattattaccagaaaaagttaaacactcacaaaagtgcggtcaaaatttatcacgtttttaaaatgactaacaatatgaacaattatcctcttttatctttaattaattctccagaagatttgcgtcttttaaataaagatcagctaccacaactctgtcaagaattacgtgcttatcttttagaatctgttagtcaaactagcggacatttagcgtcaggtttaggcactgtagagctaaccgttgcgctgcattatgtatataagacgccatttgatcagttaatttgggatgtgggacatcaagcctatccacataaaatcctaacgggtcgccgagagcaaatgtccacaattcgccaaaaagacggtattcatccttttccttggcgtgaagaaagtgaatttgatgtattaagtgttggtcactcctctacttctattagtgctggattaggtattgccgttgccgcagaacgagaaaatgcaggtagaaaaacagtatgcgtaatcggtgatggcgcaattactgcgggaatggcatttgaggcattaaatcacgcaggggcattgcatacagatatgttagttattttaaatgataacgaaatgtctatttcagaaaacgttggcgcattaaataatcatcttgcacgtattttctctggctctctttactctacgcttcgtgatggcagtaaaaaaatccttgataaagttcctccaatcaaaaactttatgaaaaaaaccgaagaacatatgaaaggtgtaatgttttcgccagaaagtacattatttgaagaactcggttttaactatattggcccagtggatgggcataacattgatgaattagtggctacgcttacgaatatgcgtaatctgaaaggcccacaatttttgcatataaaaacgaaaaaaggtaaaggatacgcacccgcagaaaaagatccgattggtttccacggtgtacctaaatttgatccaatcagtggcgaattgcccaaaaacaatagtaaaccaacttattcgaaaatttttggcgattggctatgtgaaatggcagaaaaagatgccaaaattataggtatcacacctgcaatgcgtgagggttcaggtatggtagaattttcccaacgcttcccaaaacaatattttgacgtagcgattgcagaacagcacgctgtcacgtttgccacaggacttgcaattggcggatataaacctgtcgtcgcaatttactcgacatttttacaacgtgcttacgatcaattaattcacgatgttgccattcaaaatctccctgtgctatttgcaattgatcgagcagggatagttggtgcagatggggctacacatcaaggtgcattcgatattagctttatgcgttgcattccaaatatgatcattatgacgccgagtgatgaaaatgaatgccgtcaaatgctctatactggttatcaatgtggaaaacctgcggcagtacgctatcctcgcggaaatgccgttggtgtaaaacttactcctttagaaatgcttcctattggtaaatcacgtttaattcgaaaaggtcaaaaaattgcgattttaaattttggtactctattaccatccgctttagagttatcagaaaaactcaatgcaacggttgtcgatatgcgttttgtgaaaccgattgatattgaaatgattaatatgcttgcacaaactcacgattatttggtcacattggaagaaaatgcaattcaaggtggagcgggatctgctgttgcggaagtactaaattcatcaggaaaatcaaccgcacttttacaacttggtttgccagattattttattccacaagcgacacagcaagaagcattggcagatttaggattggatacaaaaggcattgaagaaaaaattctttcttttattcagaaaactccaaattaaaaagggcggaataattccgcccattccttaaattttaaagtgccgtcaggattagatgtgttttctagtttctaaagtagaataaaatcgtttctcaatatcatctaatatctgaacaggatcaagctctaatcctttacaatattgaataaattcaagaatatctagtcttcggtcacctgtttctacttttccaataaatgacgcaagcacgcccatttttttacctaatgcacgctgtaataatcctaaatcattacgtcgttgaataaataactttctcaaccaagtatgttcagccgaatgaactgataatcttaaatttcccgttacacctatttttcagatcattaatccacaattcttaaatgggaaactgattttgttttctttttttcttctcgctttttaggcttatctactgcttcataaaaacctgttggttgttcagtatctggctcaatgttaagttcatcataaatttcctcaggttcaaacatcacgccatcgccattctcacgagcataaatcgcaagggctgcgcccattggaatatacagttcacgagagacgcctttaaaacgcgcattaaactggatgaaatcatttgtaagttgtaaattgcccgtagcactggcagacaagtttaatacaatctgtccatcttttacatattcgacaggaacattcacacctaagtaagtcgcatcaacaactaaataaggtgtaaaactattatctactaaccaatcataataggcacgtaataaataagggcgtttaggagaagatttatgttccattatttatcatccattaaattttttggtgcagcttcacctacagattgcaaaaaagaatcacgtgtaaacacacgttccatataagctttaatcgctttacttcctgtgcctgtaaattccacacctaaatgttttaatttccataataatggtgcaacatagcaatcaaccaaaccaaattcttcattcataaaataaggcatctgttgaaaaattggtgcaatccccaatagttcttcttttaactgttttaatgctgaagttttttctttttctgtgccactttctgcttttgcaagtgttggataccaatcttgttcaatacgtaacattaaaagtcgatctttagcacgagaaacaggatacacttgcattagtggaggatgtggaaaacgttcatcaagatattccattatgatgcgtgaattaaataatacgagatcacgatcaaccaacgtaggcacagtgccgtatggatttaattccattaaatcttctggtagagcttgcaaatcaacctctgcgttttcataaagcacacctttttctgccaaaacaatttttacctgatggcaataaatatcatctttatttgaaaaaagggtcattactgaacgtttacttgatgcgctggacatttattcctccgaagatccaaaaatattctaggtttttaaggggcaacattttaccataaagccttacctatttgccaatataatcttttttattgttttataatcaataagttagagtaactcaaataataaaaaagcagagatttctctctgcttttcttttggaaacgaaaataaaaattaacgttttgagtattgtggacgacgacgtgctttgtgtaaacccacttttttacgttcaacgcgacgtgcgtcacgagtaacgaaaccagctgcacgaagtgctgggcgtaatgtttcatcgtattccatcaatgcacgagtgataccgtgacggatcgcacccgcttgaccagaaataccaccacctttaacagtgatgtataggtctaatttatcagttaattcaaccaactctaatggctgacgtactaccatacgtgctgtttcgcgaccaaagtaaacatctaattcacgttggttgatagtgattttaccactgcccggtttgataaatacacgagctgaagagcttttgcggcggcctgtgccgtagttttgattctctgccattttctaaacctcgtgattaaatatctaatacttgtggttgttgtgctgcgtgttggtgttcagcacctgcatacacttttaatttacggaacattgcacggcctaatggaccttttggcaacatacctttaaccgcaatttcaatcactgcttcaggacggcgagcgatcatttctttgaaagtcgcttgtttaataccacctacatagccagtgtgccagtagtaaagtttatctgtttctttacgaccagttactgccactttgtctgcgttgataacgatgatgtaatcaccagtatctacgtgtggagtgtactcagccttgtgtttaccacgaagacgacgtgctaattcagtcgctaaacgacctaaagttttacctgtcgcatctactacgtaccagtcgcgtttaaccgtttctggttttgctacaaaagttttcattaattaattaccaaaaattagtttgatacccagtgttcttatgaacacaaccattaatcttaatcatcaccccttcgagtgcgatctcgataaaataatgtacgatgggaattcgcacatttacagggtcggcgtattatactcgttttttcataaaatgctaattttttgcgctaaaaaacaaatctattgtatttatttaacacgcatttatctttctataaaaatatacaaaaaattaccgcactttctttttcgttgtaaaatgggataaatcattgctaacaaaagtgcggtggttttgagtatgtgttgatctaaaaattagttattattgaacaatcattatccatttattgaattattaataataatcatacttttaatgaataaattgaaattgactcatattaaaacctattttattgtacaaatactattttagaatcctaaaggaagccttatgagctacgcgaaagaaattgatacattaaatcaacatattgcagattttaataaaaaaattaatgtctcctttgaattttttccacctaaaaacgaaaaaatggaaacccttctatgggattcaattcatcgtttaaaagtattaaagcctaaatttgtgtcagtcacttacggcgcaaattcgggagaacgtgaccgcactcacggcattgtgaaagccattaaacaagaaactggcttagaggccgcaccacatttaactggaattgatgccacacctgaagaattaaaacaaattgcgagagattattgggatagtggtattcgccgtattgttgcgttacgcggtgacgaacctaaaggttacgcgaaaaaaccattttatgcgtcagatcttgtggaattactccgttctgtcgctgattttgatatttctgtagccgcttatcctgaagttcatccagaagcaaaatccgcacaagcagacttaattaatttaaaacgtaaaattgatgcaggtgcaaaccacgtcattacacaatttttctttgatattgaaaactacctacgttttcgtgatcgttgtgcatcaattggtattgatactgaaatcgtacccggtattttacctgttactaattttaaacaactccaaaaaatggcatcattcactaatgtgaaaattccagcgtggttagttaaagcctatgatggtttggataatgatccaactacacgtaatcttgtggcagcaagtgttgcaatggatatggtaaaaattttatctcgcgaaggcgtgaatgacttccacttttatacattaaatcgtagtgaattaacttatgctatctgtcatatgttaggtgtaagaccttaattatcacaataatatatttcttttcaaacacaaaataagggcgatatttcgcccttatacaaaactaaaaaaattcaaccgcactttattattttatgaactctgtttgcatatacattaatcgatctatattcgttaaataatgccctaattcttgttcttcgggtttatgtaaataaggaattttacctaaaagcggcgcatcaatatgttcaacaagtaaatcaacaatttctgcataatggcttaataatggattaattcgatttgctatccaacctaataacggcacacccaattgttggataacctttaccgtcaataaagcgtgatttacgcaaccatctttaattccaactacaagtactactggcatttttcgttgagtaatccaatctgcaaaactttttccttctgccattggtgtcattaaaccaaaagatccttccaccacaacagattgataagtttgattcaaacgcgttaaatcacaattaattttatctaatttaatccgcattttatcttgtgtgagcatgggtgcacagtggctaaaagtataactattaatatcctgataagacacattttcctttgttgaatgcatcagcgttaatacatcagcatttacgaaatgatcataatcagatgtattttctgattgcgcgacaggataaatactctcttctccacaacaagcaataggtttatagccgacaacttgtactccctgctcttgcaaggcttgaatcattgcgcgtgctgctgttgttttccccacattagtatctgtccctgcgacaaaaaagctactcatttttttctcctttaaaaagtgcggtggattttaaaggaattttttatttaataatttgagataacgcaaattttcactttttttatcttataaatagacaaattatttgatctcactcaagctattaaataaaccatcatcttgttttgctatttgtaagtaaaatccttggcgtttaattgtttctaatacttcattacaatctatattgtgtagtgctttacgcccaagcagattaaacatcatcactaattctggtttaccaaaatgttcgagtaaaacgctgggaactaaagaaaaatcctctctattggcaacataaaggtaacttcctaacttcttaaatggcacatagcatatttaatttcccgaaataaaaatccgcacattttacgtgcggattacaatttatcatttcctatttttgaactgtagctaaaaattctttacgagtatctctatcttctaagaatacgccaccataagcagatgtgacagtataactatttgtatctctaataccacgcgctttcacacagaaatgggtcgctctcacatataccgccacatcatcggtttcaagaatggtttgaaatgctgtcaaaagttgctcagttaagcgttcttgaacctgtggacgttgcgcaaaaaatgaaacgattcgattaattttagaaagaccaatcacccaatcttttggatagtatgccacacaaactttaccatcaatcgtcacaaaatgatgttcacaagtgcttgttagcgtgatgtcattcacttgcaccatttcgctgactttcatttgatttttgatttttgtcatctttggaaaattcgcataatccattccactaaaaatctcatcaataaacattttagctaaacgatttggcgtttcttctaaactatcatctcgcaaatctaatccaatcagtttcatcacttcattcatatgttttgcaatgctttctcggcgttcatttttagcctgtgttggatcaatcatgggtgtctcaatacctttttcaatcaaggcatttcttacattcagtgcatccagtgaaattttgctcataatagtctttcctaaaaaaataatcggctattctagcaaaggataataggatggtaaaatgagaaaaattgcaaatttgaatgaattaggctttagatatagaatagctgacaaattttatcaaataaggattttctatgcttacattggatcaagctcgctcgaaaatgcttgaacagcttcccttcccgactcaaactgaatacctaaatttacaagaagccgccaatcgaatttgtgcagaagatattatttcgcctatcaatgttccctctttcgataattcagcaatggatggttatgctgtacgtttatcggatttacaacaatccttaaccctttcagtggcaggaaaatcttttgcaggtaatccattccaaggggaatggccatcaaaaagtgcggtcagaattatgactggtgcgatgattcctgaaggcgcagatgccgtgataatgcaagagcaagtgacactcaatgaagacggtaccgtcacttttagtgaattgcctaaaccaagccaaaacatccgccgtattggagaagatgtagaaaaaggcgatgtggtattagcacaaggcgcacctctcacccctgtttccttgccattattagcctctttaggcattgcagaagtaaaatgctatcgtcaattaaaagtcggcgtactctcaactggcgatgaacttgtggaagtcggcaagccattacaaagcggacaaatctatgacactaaccgttttaccgtaaaattactgctagaaaaactaaactgtgaagtcattgatttagggctattacctgataacgaagctgaatttgaaaaagcatttattgtcgcacaaagccaagccgatttagtgattaccagtggcggtgtttccgttggtgaagcggatttcactaaagcggtattggaaaaagtaggtcaagtaaatttctggaaaattgcaatcaaaccgggcaaaccattcgcttttggtaaattagaaaacgcttggttctgtggtttacccggtaatcctgtttctgcattagtgacattttatcaacttgttcagccactcattgctaaacttcaaggccaaaaacaatggaaaaatctaccgcacttttcagccattgccacaatgaatttgaaaaaaacagtgggacgtttagacttccaacggggtttttatcacatcaatgaacaaggtcaaattgaagtacaatcagtgggattccaaggatctcatctctttagcacttttgtaaaaagcaattgttttatcgttttagaacaagaacgaggcaatgtttctgcgggcgaaacagtgataattgagcctttcaatcatttattaggataacaaatgatcgagcttagtcacgaagaagaattgcgttataaccgtcaaattattcttaaaagcatagattttgatgggcaagaaaaactcaaagcaagcaaaatgttgatcgttgggcttggcggcttaggttgcgcagccagccaatatctcgcagcggcaggcgttggcaatttaacgctgttggatttcgatactgtttctctttcgaatcttcagcgacaagtcttgcactgcgatgcacgcttgaatatgcccaaagtagagtcagctaaaattgcactggaacaaatcaatccacatataaacattgagacgattaatgctaagttagacgaagaaaaactcgcagagatcattccgcactttgatattgttttagattgtacagacaatgtagaaatccgtaatcaattggatcgccaatgtaataatgcaaaaatccctcttatttcaggtgcggcaattcgaatggaaggtcaggtttccgttttcacttatgaaccgaatacacccacttatcgtgatctcagcaaattatttgggcaaaatatattaagctgtgtagaagcaggcgtgcttgcaccaatcgtcggcattgtgggaagcattcaagccttagaagcaattaaagtgcggttaaaaaccggtaagaatttgtgtggacgcttattgatgattgatggtttttcgatgaatattcgagaaattaagcttccaaccaatatggaataaaacgcttaaaagagaaaaaatttaaccgcacttttattaaccataacctttacgacaaaacactatgacaacagaaattaaaaaacttgatccagatacagccattgatattgcttacgatattttcttagaaatggctggagaaaatttagatcctgctgatattcttttattcaacctacaatttgaagaacgcggtggtgtggaatttgttgaaaccgccgatgattgggaagaagaaattggtgtactaattgacccagaagaatacgccgaagtgtgggtgggcttagtcaatgagcaagatgaaatggatgatgtctttgctaaattcttaatttctcaccgagaagaagatcgcgaatttcacgttatttggaaaaagtaacgataacgtaaaaataagggaaatcatctgatttccctttttcttttcgcttaaaattaacaagccatcaaattggaaataaaaagcggcttaaaaataagccgcttgttatcgttatttttcagcaaacactcgaatttgctctgcacctaaatgtcctggtacggtttttttcaggtttaaatcactatctaaaaagagattgaacggatagccacgcactcttgctttatcaatgatttcgcctttttcatctaaaagcaccgtgatatttttatattctaatcccttgtaccactcaataaaatcagcggtgtctttttcgcctttgtgatcgggtgaaacaatggtaatcacttcaaaattgcgatctttttccgcacttaaatcatcaatttcagctaatcctgccaaacaaattggacaccaagatgcccacatttttacatacacgggtttgcctttatattggcttaaagtaactggctgattgtttaaatctttgagttgcacatccgccaaattagtttgtgcaaaagcgtttaggctgaatgccattagaaatatggatagtagttttttcattgcttttttccttttatagatttcttttgttgaggttatgttttacgaaaaattattcgtaatcaataaaatacccatcacgataattaaaattccgccagcgattttaaatttgtctaagtgtttatttaaccctttagcacgttttagcaagctgtctgagaagaatgaaaataatacaaacggcgttgccaagcctaaaacataaacgaacatcattgatgcaccgtaaagtgcggatccttcatcgcctgataaagctaacacggaagccaaaatcgggccaatacaaggcgtccaaccaaggctaaaggttaaaccaaggacaaatgcctcaagtgcggttgattttcctgatgtttttatttccaccaattttgtgcgttccaacaaaccaattttgaaaatgccaagttgatgaatacccaaaataatcacaataataccagcgataatgcgggtggtgttactaaataaaatattccctaaaaaaccaaaactaaagcctaaactgacaaatgtaagggaaagccctaaaataaataaaaaagtatttaggacttttttaccgcctttactcaaaataccaaaataaattggaataatcgggaaaatacaaggcgaaagaaaagaagcaagcccagctaaaaatacagttccaataaggagttgttgatctaacatcctacatctccttattttttaatggattgaatcaaatatccatatcctgccttttccatttctgctaacgggataaatttaattgatgcactgttaatgcaataacgcaaaccacctttatctttcgggccgtcatcaaaaacgtgacctaaatgagcattgcccgcacggcttaatacttcggtacgttgcatattgaagctgttgtcggtttcataatgcactacatctttaatgatcggtttcgtaaaacttggccagccacaacctgattcaaatttatcatttgaagagaaaacaggctcgcctgtagtgacatcaacataaataccaggttggaagttatcccaatattcgttactaaaagagcgttcagtatgtttattttgagtaacggaatattgcaacggtgtcaatttcgctttgagttccgcatcactcggtttcggataatctttctcatcaatcacaggttcatctgctttggtaatatcaatatggcagtagccatttggatttttcttcaaataatcctgatgatattcttctgctacgatgtaatttttaatcggttgtacctcaacttgtactggttttttatatttggtttgaagctgggcgagtgcttgttcgatcaccgctttatctgctccatcttgataataaatccctgtgcgatattgtctgccacggtcgttaccttgtttgtttacgctggttggatcaatcactttaaaataatatttaagcaatttatctaacgaaatttggtttgcatcgtaagtgacttttaccgtttctgcgtgatcggttagcccaatcatctgataactggttttctccgtattaccatttgcatagccagaaatcgcatctttcacaccgtgaatacgctccatatatgcttccataccccaaaaacagccgccagcaagataaatttctcgaatgttttgtgtattttccattgccattttttgttctccagatgatgatgttgaattttgtattgctaaagttggtgctgcacagcaaagtgcggtaataaatagaaatgtttttgatagtttcattgcttttccttatgaagtaaaaattaacgttacataaggttagacggcggataatccgatttcttacagatttttttacttaagtttgaattgtggtagaaaataagaggggaattttaaataaaaaagactaagtctaaattaaatatagacttagtcttgtttaaataaaatgatgttgttagagcagaattttaatgacttactgccatatttagtttagaaatagccttcttaccttcttcttcagaaacttgttctaaatttgcaccgcctacaaatacaccaaatttaatatattgacgaataaaatagtttttaccactttcagttttaatgtttaaatcattattactgaattcggattcagttgaaattttatgctctcccgctttaatggttttataaaaaaatacatcaggagcagactcacctataaatttatcgtcaatatagagatctttctttaaagcttttcctataaaagaatcacggtagatatataatcctgaatttcctttttcgggagatctgaattgtttggcggtattactttcttcaacagaagccataggaacggttgcacaagctgaaagtaataacgctacccctataattgatgctcttgcaaataactgtttcacaaaatacccattagaaactaaaacgtaaaccagccttaacgcccacatcagaaacatttgaggctaaacggttatattcaatattagtattaagtgccacgttatcagttaatttatattgaacaccagctaatgcaccaatgcctattctcgtttcggttgcaaaagcttctatgcgataatatcttgcatttgcatttgcagttacatctgctccattggtagatacacggacaccaacataaggtttgaaatcggctaagtcaaaatcataaaaaccagtgaggcctaatgatttacctttaagagatacatctacaacatcagcataatttgcagttacttttccgtagtttgtataatctacggctaaacgaaagttcttatcaaaagcatagccaacactaattcgttgggtaaaagatggactgtctgaactatttaaatcagtaatatcaatttttgaagcacctaaatcgccttgaacataccattgagcttgagctgatagtgctaaagtaaataacatagttacaataagtaattttttcatagattaagacctctaaatgtgtgaaaatacatcagttgcataagtaaatgcgggtaaattttatggaagtttaaccattaaaaacaacaacaaaaaggacaaaatagcacctaatttcggcaaaaattgctcaaaattgctcaatttcgaaaggattaaatttagatgggaatgcacgataaaattcgtatgatgagagagcttcgtcaattatcgcaagaagatatggctgagaaaatgaatatgtcgccaagtggttatgccaagattgaacgaggtgaaactcgcctacaatacgataaattagtgcaaattgctcagatatttaatatgaatttgtctgacctagtggatgagaatagagggattatatttttattaaatgaaaatggaaataatacatcaactaactattatggaaataacgactctttaataattgaaattgaaaaattaaaattaacactttttcataaaaatgaattattagagcagaaagaaaaagaattagaaatgcttagaaaaatgatttcattattagaaaagtgaaataaagtatttttaacaataaacggttgaagttgtaaaatattttgcaaattcaaccgcttattttttgctacctatcagttaattctatagatggttcggcatccctaaattgcttcatcatctcgcttaaggttttgcaatttctttgaaaacgacgacaatgtgggcaggtaactaaatgaactcttaacccaactttttcttgtatatctaatgaacgttcgtgcgattcggaaatcattcgagtggcttggtgacaacgcataattttctcctaaagtttttttgaaagacagttttgcaactgtaaacgcgcccgataaagggtggtatgtaaattagacgaagttaaatgtgtttcttgacaaatttcttcagatgaaagctctaaaaactctcgcatcataaaaatttttgcctgtttagcaggtaaacaagtcaaacagctttcaaaaatcagccaaaattcatcggaataaaccgtttcttcttcgccttgtaactcactcgggtgatattctggtttccaatgccccttttcatcaaaaaatgaattattagtattttcatcttcaagttcactttctaaaacaaaccgccctttctgacgtaaataatcaataatcttatttttaagaatcgcaaaaatccaagtcttaaatgcagattgacgcttaaaattagcgagatttttgaatgcacttaaaaaagcttcttgtactaaatcttcagcaagatcggcttgatttacttgcaattgtgcaaatgtcagcatttgagtgcgaatttgctgaagctcaagatcagaaataacattcattttaattcctttaaaacttatgtaagaaatgaaactcacttcttttaacaaactaaggtagctatttttacactcaaaaaaggaaatttaaaatgaaaaattttatattgaatctattttgcgaagttaggaaaaaatcaggtgtttaagaaaagaataattgataccgctttttaacgtgatatttgcttggtgtgtagccgacaccaattgccaccgcattacggatgccataaccgcccaccgctgcagaaaaactcgcttttccaaccacttgaggtaacactaaaccagaaagggcgttagccgctgctaaaccacgttctaatttgctgtccaatttccctaatttgccatttaactcgttaaagcctgattggaaattattcatttgagtttgtaacgtgcctaatttgagatcggtatattgatttgcagtttgtaaagtttgtgtatcgccatcatccatttgttttttatttactgcgtcagtgtctttttcggctgcttttacattagcaatgtatctttctgtaccttctctaccaaaagaaacttgattttctcttgtagtttctgaactatatcctacagcaatagagttgttatatttagcttttgctttgttacctagaacaatagcattttctacttcattagtaccagtttcatttttagcctcactttcataacctatagcatgttatatgaaccttcaaccttatttgccccccccaatactgtattatatataccatctttgtaagtcctaaagtcttcggcttttttactattaattgtattattctttaaatgaccaatgatcaggctatacgccccaaactctttaatgccgtaattcgtactaattgaattttcactcgccgcaaaggcttgggaagagatcagcaaactgctgataagttaagctgtcgtggttagcttgacagatgaaaagaaaagattagcattgcttgcttgcttgcttgcttgcttgcttgcttgcttgcttgcttgcttgcttgcttgcttgcttgcttgcttgcttgcttgcttgcttgcagaattgtaataaaacatattatatcctcctaggataaaacaaaaaagaagcgtgactttacgttaaataaattgatgtaaaggaaatacaaattttttcgtgcaaattccaatatttaactttaaaatacttgcctctgaacaaacattcattataaataaaagtcacaatatttattttataaataaaaaagtgcggttaaaatcatccgcactttttagttcgtagaaaggaaaattcaatgtttaaaatgaaaaatatcacgcttgctttgttgatgtctagtgcattagtgggatgtgccaatattggcgattcttatcaagctagccttgaagattacaagcaatatgaagaaattaccaagcaatataatgtaaaagaaaattggtggtcgttatatgatgatgcgcaattaaatcgcgtagtagaacaagcattaataaacaacaaagatttagctaaagcagccgtggcggtaaaccgtgcgctttacagtgcaaatttagtgggcgcaaatttagtgcctgcatttaatggttcaacttcatcagcagcacaacgccgagttgatatcagtacaaactccgccatttcacacaaaggttctttaaatgtgagctatacattagatctgtggcaacgtttggccaatactgttgatgcggcggaatggtcgcacaaagcaactgcagaagatatggaatcggctcgtttatcattaatcaattctgtagtaacaacttattatcaaattgcttatttaaatgatgcaattagcacaaccaacgaaacgatcaaatattacacggatattggcaatattatgcaaacgcgtttagcgcaaggcgtggctgatgcagccagcgttgatcaagcacaacaagccatattaacggcacgtaataacaaattaaattttgaaacccaacgcaaaacagcagaacaaacactgcgtaatcttctcaacctaaaaccaaatgaagcattaaatatcacgttccctcacattatgaatgtgaaaacggcaggcgtaaacttaaacgtgcctgtgtctgtaattgcaaatcgtcctgatgtaaaagccgcgcaattccgtttaagcagtgcattcaaaaatgccaaagcaactcaaaaaagttggttcccagaggttaatttaggtgcaagcctttcttcaacagcaagcacggttggtacggcgttacataaccctgtggctgctggcacagtcggaattagcctaccgttcttaaattggaacaccgtaaaatggaacgttaaaatttctgaagcagactatgaaacggcacgtttaaattacgaacaacgtattaccacagctctcaataatgtggataccaactatttcgcatttacccaagcgcaaagtacattaagtaatttacagcaaacccatagttacaatcagcgtatcacacaatattatcgaaaccgctataatgcgggcgtatccgaattgcgcgaatggttagttgcagccaatacggaaaaatcatcacaacttgcgattttgaatgcaaaatatcaagtgctgcaaagtgaaaatgcggtatatagctcaatggcgggatattatttgtaaaaatcaaattggattaatctataaaaaatccctgttaaatttctttaacagggattttgttatttaaattaaacctattattttgtcgcttctttcactgcatctactgcttgagttgctttttctgaaaccgcctctttcatttcagttgctttttctttcatttcgcctactttttctgatgctgcttctttcatctcacttgctttttctgaaaccgcctcttttatttcagttgctttttctgatgctgtttctgttgctgatttaattacttctttcgcatcttccactttctctgctactttatttttcacgtctgtagaaagctgctgtgctttttcctttacttcagtcattgtattagctgcagcatcttttgtttctgatgcgactgatgctacagtttgtttcgtatcctcaactttttgttttgcttcttgcttatcaaaacaacctgtcacggctaaagctgaacctaaaaccaatgctaatgttaattttttcattattttctccatagaataatttgattattacaaagccctattactttgatgcagtttagtttacgggaattttcataaaaagaaaaacagtaatagtaaaactttacctttctttaaaaagattactttataaaataacatctaagatattgattttaatagattatataaaaaaccaataaaaattttattttttgtaaaaaagaatagtttattttaaataaattacaggagatgcttgatgcatcaatatttctgatttattaccatcccataataattgagcaatagttgcaggataaaatgatattaactacaccacctggatcttgaataccataaagtacagatgcaggtccttttaaaacttcaacggtttcagttgtcgcgctaaagtttttagctgggccagcttgtaaaccgttacgcataattgagttgtcacggtttctaccaaaaccacgtttttggatagcatcaaacataccacctaacgtattcgcttggctcacaccactgacgttataaagcgcatcaatgagtgattcaggtttgcgatcttctagtagtttagttgaaagaatatttactgtgtttggcgtgtcgaatactggcacttcagcttttgatacgacggatgtccctgttgtttgataaccattttgtttaatacctgtatcttgaacattaatttgttcaatcgtttcagtattagctttatgttgcgtttctgctaacgcagaaacagaaatcccagcaaaaagtgcggtgtaaactaagcttaatttaaaattcataaattgcttcccaaaagttaaatataggttaaaaaaaggttacaagtataaaaaaaatataacaatttaagcaatgaaaatcattatcatttaatgtctattacattaatcaatggtattatgatgaaatcgatgcagtgggtcgccaacgtggtgcgggcttaggtggcggacacgatgagcgtgaacaaaccttaaaccaaatgctggttgaaatggatggctttagcggtaatgacggcgtaattgttattgcagcaactaaccgtccagatgtgcttgatccagctttaacccgtccaggccgttttgaccggcaagtagttgttggcttacctgatgtgaaaggtcgtgagcaaatcttaaaagtgcatatgcgtaaagtgtctgttgcgcaagatgttgatgcaatgacgttagcgcgtggtacgccgggctattctggtgcagatttagcaaatttagtcaatgaggcggctttgtttgctgctcgagtgaataaacgtacggtaaccatgcttgagtttgaaaaagcgaaagataaaatcaatatggggccagagcgtcgcactatgattatgacggataagcaaaaagaatccactgcttatcatgaagcaggtcacgccattgtggggtatttagtgcctgaacacgatcctgttcacaaagtgacgattattcctcgaggacgtgccttgggtgtgacattcttcttacctgagggcgatcaaattagtattagccaaaaacaaaattagaaaggtaagctttctaccttgtnnnnncattccattcattaattaattaatgaatgaatgnnnnngtgcatcaaatgatattaaagtcgcaactaatattgcgcgtaatatggtaacgcaatggggattctctgaaaagttaggtccgattctttatacggaagatgagggcgaggttttcttaggtcgttcaatggcgaaagcgaaacatatgtcagatgaaaccgctcatgcaattgatgaagaagtgcgtgcaattgtaaatcgtaactatgcgagagcaagagagattttgaacgacaatatggatattcttcatgcgatgaaagatgcattagtcaaatatgaaaccattgaagaagagcaaattaaacaattgatgaatcgcgaacctgttacaccgccatcaggttggggagagccgaaaactcagcaggctgcttatgcaaattcaacaacgaatgatacaaagcccgaaagtgcggtagaaaataccgatgattttaatgtttaactcatcaaagcctttcttcggaaagactttattttttcctaatgattttgttcttggatgtatttcgctataatcgcccaccaaaatcactctaaaaattaaccgcactttatgaaactttacgcaaataataaatgtcttgatttaagcgagcctcaaattatggggattcttaattttacgcctgattctttttctgatagcggacagttttttagtctagataaagcactttttcaagtggaaaaaatgctagaagagggggcaacaattattgatattggtggagaatccactcgtccgaatgcggatgaagtttctgaacaagaggaattgcatcgtgttgtgccagtagtggaggcggtgcgaaaccgttttgattgctggatttctgttgattcctcaaaagcaattgtgatgcgtgaagtggcaaatgttggaatggatttgattaatgatattcgcgctttgcaagagccaaatgccttagaaacggcagtaaaactggctttacctgtttgtattatgcatatgcaagggcaacctcgcacgatgcaagcaaatccttattatgaaaatgtcgtgcaagatgtattggcttttttacaaaaacgtactaatgaatgtctttttgctggcattaaaaaagaaaatttaatttgggatatgggctttggctttggcaaatctgtacagcataattatcaattattacaaaatctgaatgaattttgtaagaatggctatccagtattagcgggattatctcgcaaatcaatgattggtgcagtgcttgataaacctgttgatcaaagaataattggcagtgcggcaggcacgcttattgcagcgcaaaaaggtgcaaaaattttacgcgtacatgatgttgctgcaacatcagatatgctcaaagtttggcaggcaacagaaaatgcctgatgattttataacgataaaaaattaaaggaattgtgttatggtaaatcgtaaatattttggaacagatggtgtacgtggaaaagtaggtgcttacccaattacaccagatttcgcattaaaattaggttgggctgcgggaaaagtattagcttcccaaggttcgaaaatggttttaatcggtaaagacacccgaatttctggatatatgttggaatcagccctcgaagcaggtttggctgctgcggggttatctgctgcatttaccggccctatgccgacacctgctattgcttatttaaccagaactttccgagctgaagcaggtattgtgatctcagcctctcataatccttattatgataatggcattaaattcttttcagcaaaaggcactaaattacctgatgaaattgaagaagccattgaagcaatgttagaacaacctatggattgtgtggaatctgccgaattaggtaaagcaagccgtattaatgatgcaacaggacgctacattgagttttgtaaagggacattcccagcacacttaggcttggagggttataaaatcgtggtagattgtgcaaatggtgcaacctaccatattgcgcctaacgtgtttagagagctaggtgcggaagttattgaaattggtacggatccaaatggtttaaatattaatgaaaaatgtggtgcaactgatgtaactgcattgcaagctaaagtagttgaaatgaaagctgatgttggcttagcttatgatggcgatggtgaccgcattatgatggtcgatcatttaggaaataaagtcgatggcgaccaaattctctttattattgcgcgtgaagcattgcgctcaggtcaattaaaaggcggtgtcgttggcaccttaatgagtaatatgagcttagagattgcgttgaaaatgcttggtgttcccttcttacgtgcaaacgtgggagaccgttatgtattggaaaaaatggttgaaaatgattggacgcttgggggggagaattctggacatattatcattgcggataagaatacaactggcgatggcattgttgcgtcattggctgtattggcggcgatggcacagcataaattatcattaaatgaattagcaagtgcggttaaattattccctcaagtgttaatcaatgtacgttttgcgggtggggaaaatccacttgaaagtgatgctgtaaaatctgttgccgcagaggttgaaaaacgtttagaaggtaaaggtcgtattttattgcgtaaatcgggtacggaaccacttattcgcgttatggtggaatgccaagatgctgaacttgcacaacaatgtgcagaagaaattgcagaagccgtgaaaaaaattaattaatttttgaccgcacttagtaaagtgcggtttatttttataaagtttttaggaaagcaaaatgaacatttttattatgcgtcatggcgaagcggaagtaatggctgatagcgataaagctcgtcgcttaactgcttatggtattaaacaagctttttctcaaggagaatggttaaaacagcatttgagtacattattaattaattcactagaccgtattttagtgagcccttatgtcagagctcaagaaacctttcatcaagttaatcaagcgtttgatttggagttagaaaataaatttgaaatttgggaggggattacgccttatggccatgcgcattcagtcattgattatttagaagtgctaaaagacgagggcgttaaatctgtattgattgtttcccatttgcccttagtgggagaaattgttgctgaactgtatggaaaacgaaatccaatatcattactaaaaaaccacaacaaacgccacgttatgtcgttagtggaaccttaggtaatcatagcctgtggggaacgcaattagattttactggtggtttaggaaatggttttgcttaccgctttatctatgataaacaagaaaaagactactggcgtaattttggaaaagtgaaaaatacgacttacgccccctctctttcttgggaaaatgataaaactaaagtgcttctttcttatgaacacaaagatattcttgagccatttgatcgtggtacaaatcttttaacggcaactaatgcattaccagatattcctgtatcgcgtcgtttagatgagccaaataatgaaaccacggcaaaaaccgataacatcgatttcaaaattgaacacaaattaagtgacagttggaaattaaattttggctatagctacgcacgttataaatatttctataatcaagcccgaattaaagatattaatgtatcaaatattaatcaaccaaaaaaactcaataaaaacaaaattacagcacttgaattaactgctcgtagcgcaactcgagatattgagcaacaaactggagagcaacgtatccatagtgtttctttaaacacagtcggggaatttgctattggagatattgcgaatcgctttgttgtgggcacagatcttatgagaaataaaatggatttaggaccaatttataatactagagacataaatgatggtaaggttattaatattgacaacccaaattataccaatccagtggcaataaagaaaaatgaaaataacaatgcctaccaatttaatcacttaaaaactttaggtctttatattcaaaataccacttattttacagataactttattataacgggaggacttcgttatgaatattttgatcaagttgttggtcgatcaacattaaagaatattagaagtggatatctggctcaaaaagacgggaaacttctctatcagttaggtagtgtttataaatttactccaaatattgcaacattttttaaccatgcagaatcattccgtccacaaaataatagaacgcttattattaatggcgaacttcctgctgaacagggtaaatcttttgaaacaggtctaaaatatgagaatgcatatttaaatgcaactgtagctttatttaatataaacaaacgtaatgttgcagaaacagttaatgttaatggcacaaatgaactacaaattgttggaaaacagcgttctcgtggcattgagtttgatctaaatggacaacttactgataatttaagtattgcagcaaactatacttacacaaaagtaaaaaacctagaaaatcacaacaataaattagctgttggtaaacaactttctggcgtaccaaaacatcaatcatcattattcttagcctataatatcggcgaatttgattttggtaatattcgtgtcggtggaggtgcgcgttatttaggttcttggtatgcctataataatacttataaaaagcgtataaacttccacaggctattgtttatgatgcatttattgcctatgacacaaaaatttcagggaaaaaagtatcctttcagttaaatggtaaaaacttatctaataaagtttactccccatcaacttcagggaatgcaagcagaacgcttattcctgttgcgttaggctatgctcgtgaagttatattaaacactaaaattgaattttaattagtcattaaaacctagggcaaactggattcgctctttttctatttatggaaaactaatgaactggcaaaccgaacttaataatagtttaaactggattttaaccgcacttttttgggtgatattgtgctttagtgtaacaatgttagccttaaaacaaactactttcggcaaaaaattctggtgtattgtctctccatcaatggataaaaaaacaagcattaaactaattttaatgttgttagtactatttataatgatattgttggaagtacgatttagtgtacttaattcatttttttacaatggattgtatagctcaatgcaagaattaaatattgagaaattttggttctttgcaaaactaaatgccctccttgtggtagcacaagttatacatgccattgctgattacttctttcaacaagtatttgaaattcgttggttggaaagctttaatgcaacacttgttaaacgctggctaaataagaaaaaatactatcgcctaaaatatgaacgagatttaccggataatatcgatcaacgtatcgaacaagatgcgagagaatttattaccagtacagtacaaattgtgcgaggcgtgattaactcggtgctcacgaccattgaatttacgattattttatggtcactttccggcgtattaactttattcggatttaatatcgaaaaaggcgttgttttcttcatttatgcctttattatttttgcaacactcatgtctgtttggattggtcgccctctaattaagctgaattttacgaaagaaaaactcaatggcgattatcgttattccttaatccgtgtacgagacaatgcagaaagcattgctttttataatggcgagccaaaagaacaaactttcttacaacatcaattccgtcaaattattcataaccgttggtccattgtattaaaaatgttgggcttaaatagtttcaactctggagtaactcgcgtggccaaattattgcctttaatgttacaagcaccacgtttcttttctggacaaataaaactaggagatatgcatcaaacagtccaagcatttaaccgattaatgaccgcactttcattcttccgcttgttctatgagcaattcacactctatcaagctcggttaaatcgtctttatggttttataacaaaaatggatgaattagataaacaaaacgttcatcatccttttcattgctctcatcgtgtcgccttaaaaaatttcggtattaaagatgaacaaggtcatgtactactcaataatttaaatattaatttagaaaatggagatgccctattaattcaaggtgcatctggaacaggaaaaacatcgctactaaaagcaattgcaggaatctatcctttgaaaccataggtattgcagagcatccatgcatgggaagtttattcctgccacaacgaccttatatgccgcagggtactttacgagaagcaatttgttatccaaatatcaatccaagtcacgcagaattggaacaaaccatgaaggattgtgcgctaggaaaatatatacacgcacttaatgtaaaaaatgactggcaagcgattttatcgcccggcgaacttcaaagagtggcgtttattcgtattttactcacaaaaccagatgtcgtatttctcgatgaaacgacttcagcattggatgaaataaccgagaatttactctaccaaacaattaaagagcgtttgcccgaaatgatcattctcagcgtaggtcatcgtagcacattacagcaatttcataacaaacagttaaaattagatgtatgtttattatgtgaaaattagaaaatagcaagttaatatatcagacaaatatttaatttattttgatgctagtctgaagagcgcctataaaattaaaataaaactataaaaaaagccctcgatattcgagggcttgattttttactatcgtaataaaaattagcgacgtaaacctaaacgagcgatagtgctttggtataaagcaagatcagtacgttttaagtagtctaaaagtttacgacgacgagaaaccatacgtaataaaccacgacgactatggtggtcttttttgtgctctgcgaagtgagtttgtaagtggttgatttgtgcagttaataatgcgatttgaacttcagaagaaccggtatctttcgcatcacgaccaaattcagcaacgattgctgcttttttttcagtacttagagacattttttactcctaaaaggtagtgttgttaatacatcattcgccgatctctaactcagcgatgacaaggagcctgcattctagccatgaataagcttaaatgcaaggtttattctagtaaaaaaccatgattcttaatgatttctttagctttattagaccgtaaaaattcaaaaaatttaaccgcactttcaacattgcttaataaagccatgacatattcagcttttacctcaaattcaatagggaacatatgagtcaaaaatgtttgattattcacagtaatactagaatttgtatttatagatgcatcgtacttacttggcttaacttcagatcttaattgataatgtgcataaccgatcatcatatcagcataactatttaataataaataatgagatgcaattttcccttttggaactatatttgaagaagtaccgcctactaatttcaacgctcgtcgtttcaatgcctccccttcaccaggaaaacattgctcaattttatcaaataaccgccaagtataatctccacaaggatcacaagatggcgttgatgttgcgaggcgtaaagagcgatcaaatagcaattcaaaaatggatttatgacggaagtgttctaaatttaacgtagttaatgctaattgattaaaggctatcgttaatttttgataaatttttttagaatcagctaattgaagcacatttccaggatttgcactaataaaaatatcacctctattcccttgctcaatttgttgacgcaagattccggctggaccacaaaatgctttaatctctatatgatgaatttgtcgaaaaatatcagataattcttgcagagcataacaaaaactacctgcactaaaaacagtaattgattccacaagttttccttactttaataacgttttatacaagggaacaaaatgcgtaaaaaaagattctttatattgagcttgttgttcaaacatcggtaaatgaaaaagtgcggtcaaattttctgaggttaaaatattccttgtttcgccaaatttaaaattttgtttatttaacaataaagttttattggctatcgctacagcttgattaggttgatgtgttgtgaatacgacagtcatgttctgtgattgtgccaaatcgataagtaaagacaatacgatatcttgatttgcaagatctaatgctgaagttggctcatccaacagtatcaatttgcattctgaagcaatggctctcgcaattaaaattagttgtcgctgcccgcccgaaagcgaagtaaattcgcgctttgccaaatgggtcaagttcaaataatccagtgcctgcatggcgacttgataatcatacggtttcggtttggcaaaagtattaatatgggttgagcgccccatcagcacaatatccaatatggaataagcaaaaggcgaagaaaagaattgcggcacaaaactgatagattgatacacctcaatcttgccctgaatcgggcgatgaatgccaagcaacaaatccaacaaggtgctttttccgcaaccgttttgccctaaaatcgccagaatatctcctttattcaaatcaaaattcagttgctgaaacaggaagttttccgcttggtaataaaaacctagattttccacggagagcgctttattcattcatgcctccgcgttttagtttatataccaatacaccaaacaacggtgcaccaataagtgcggtcaaaatactgattggaatttcggcatcggatagggaacgcgcaacattgtccacaagcaacatataagtcgccccaacaagcatggtgcaaggcaataaacgttgatgattggcgcctaccagcatacggctaagatgaggaatgatcagcccgacccagccgatactgccgctaattgccacctggcatgccactaacgaaccgcttaaaaagatcactaaccaacgtaatggggccactttcacgcccaaagccttggcttctttctcatctaaagacagtaaattcaagcgccaacttaagctgagcaaaatcgagctacacagcaaaaacgggacaaagaaaaagaggagtttttcccagttagaggtggcaaaactccccatcaaccaaaacacaatgcttggcaatttttcttctgtgtcggaaatgtattgcaataggctcactagggctgaaaaaagcccgcttaaaatcatgccgataagaataagcatcaacaagctgcgttgattaaatttgaagctaaatagaaaaaccaaggcaagcgtgccgaagccaaataaaatagtgctggcaaataagccgtataaactgaatccaaagaaaattgccaaggtgccaccgaaggctgaaccggaggtcacgccgataatatgcggatccactaacgggttacgaaaaatgccttgtaataccacaccactcaatgccaaaccggcacccacgcaaagtgcggtcgcttttgcccacagaatttgaccaatttgcggtacagacaaagaataccgccctattcccaaagaaatcacggcggtaatcacaagcaacagcgttaagccaaagagaattttagggtagctatctggctgcattgtcgggtttgtaagaagtgcggtagaatttttggtaataatcgttcaccattttatccaaatccacgtcttggaaacgttgcggataaagggctttagccaaccatacttcgcccaatgctaaggcttccggcatcgggtatccccaggctttagcatattccggcatcaaaaaaacttttttatctttcagtgcctgaatattcgcccaaccttgatcgttcaaaatttgtggtactacatcaggataacgatcttgcaccaaaatcaccgcaggattccattccaacacattttctagagaaacctgtttgaaacctttaatggttgccgctgcgacgttataagcgcccgcatgttccatcataagccccgtatatttaccggaaccataagtgcctaaatccggatttgccatataagtgcgcacacgtttatcggcagaaacgtcgcctaggcgatctgccaacaacttatgattagcaaaggcagctttcactaactcatcaccttgttgttttttctcaaacacctcggcaatcagttcaatgccctgttttaagccgtcattataagctttatcttcgtcagttaaggttggattaagtttacctttttcgcccacttcaccagtacgcaaggaaatggctaccacagggatattcacgtcactgatttgcttgatcatttcagacggtgcgtagttagtcacaaacaccacatccggttttaacgccaacagactttcaatattaacggaattcaaatcgcccggcatcgccatgttttccagctccggtgcaaggcgaacatagtttttgcctagttgtttcttccagttggaaagcactcccacaatctgttttgtggcatccaactgcacggcaatattcaaggtttggtgctgtaacaccacggctcggttaatgtgatcgggaattgtcactttgcgatcgagttggtctgtaataatgcgatcagctaatgctgaaaaagaaagggaactgagcaagccggcaattaacaatgatttaagtttcatcgcacatccttattttaagtaagaaaatatcattatacacatatttatataatgataaactctgtactcatatcttttcaatcaccacctttatatcttctggcggtgcataataaggtgcagaagtgataaataaacgaatacccaatttggcgtaatctgatacattatttttatttactcctccagcgacagaaagcagaatatctttctgttttgattgaagtagatctaaagcctttttcacatcctctaacaaccatttatccagttgaataatgtcgggttcagccatatacatttgctcaaattgagcataattatctgcttctaaagtaattttattttcaggtgcttcttgacgtaatctatccacaattttcgtccaatcatttggatcagaaagtaagtttcgatgattagtaaaaaccaaaagagtttcgctaacgccttggcgatgaatatgcccaccagcggctaatacagcattcgtcgcaagtttacgcgtattaggaatacttttacgcgtgcaagccacaacagcatttggattaaccgatttggcattggcaatcatttctgcagtatattgagcaaccccacacgaccattcaagcaccaattgcaccactttccaagcttgatgtaattgttcagacattccttccgcactgatcaacaaagcacctgattcaacccaatccccttcttttacatataagtgcggttgaatatccagtttttttaataatttttccgcaacagaaacacccgccacaacccctgcatttttacgcttaaacagaatttttgccggaatattttcaatactaagggcatgagtggttaaatcaccacgataaatgtcctcaagcaataaatcatccaattctttatctgaaaaataaatcatcgtaactccttaaattaattgaccctgatataactgaatctgcttacctgaaaaatactcggcttcttttggctcatgcgttactaaaattgttgtaatttcatttgtttgaattaaattttttaacactttccaaatatctttacgggaagaccaatctaaagaagaaaaaggctcatctaaaagtaataaatcaggacgataaattagtgcccttgctaaagctacacgctgttgttctccaccggacaactgatgaggatagcgattaataagatgatctatttttaattcagataataatatctgttgttcagcatcagatgctgatggattagcaagtattaaatttcctcgtaccgttttatgaggaaacaaataaagtcgttgatttaaataacgaaaatttctcttccacggaggattattttctagaacttggttattccataaaatagagccagaataatcaatataaccagcaatcgcatttaataaagtcgtttttccgctacctgattcaccaacaacagaaaggcattcacttttttcaattgaaaaagaaatagattttaaaatattagtttgaagattctgaactattaacatactaaacagccctattaatcatccgtaaaactagcaacaaacatgtagatataaataaaagccataatgatgcgccaatagcgatttcaaaatcaccacttgaaatattcaaatagactgccataggtaaagtttcggttttaaatcgcgttgctcctgccaacattaatgtggctccgaactcccctattgcgcgagaccaagctaaaactgaagcacaaaccaaaggcttccaacacataggaatctctatttttattaaagtcttaaacggtgataacccaagagtataagatgcaaatcgataacctgattcaaaggaagaaaaaataccgcgagtgctacgcaataaaatcgaactcgcaatataagtctgagcaataatgatccctgcaggggaaaaaatccatttacttataaaaggaagcagttcagccaatatcccttgtgaactaaaaagtagaagcaaacttagacctgtgactaatggtggcaaaaccattggtaaatcaaacaaagtgtcaaaaaatgattgaaaaggcaaccgcacttgactcattcaccatgcagatggaatagcaatacataatgctaatatcaaagaaaaaagagacgttcccaatgacattagcaatgcaaaatgcaattcggaattaaataatatttgttgaaaaaaataaaaatctaattttgcgattaaagaaagcaccgatcccataataacaaataatagtattaataatgggatcagcgctaactttaaacttagacaattatttagccggtaagaaaccttcatcagtaaaatacttcacgccttgaggagatttaaagaaatcaaataactgttgagcttcttttggatatttagaagaagaaagtagaccaatagtaactttttcttctggtgtgccttttggacttggtaataattcaaccttgtctcgaactttccaagcacctgaacgacctactacagctgcatctacatcaccatttaataaatatagcattaattgttttaccgtcgcagctttcacaacaactttatcattaagttgcttttgatatcctgacaactcaaacattttttcagcgcctttaccaagagccattgctttactatcaccaatacctaaacgtaatgagctttcagctaatgctttaaaagaatcaatccctgaaattttatctttacgaatagccataactggaacatgcaatactatggtccctatattgtttacatcattagttttctgtaattttgtgacataatcctctgaacccgctaaaaaaagatcaccactttttaccgtgttataacgagctagaatctgtccagaaccaccatattcaacagttactttatttcctgtttcttgttcatattggtgaataattttttccacaggctccttcagtcccgccccagcatataaatacaagtctgcagcttgtacagaaaatgtagttaaaatcattgaagttaccgcaactaattttttcattttctctccttataaaatgagtttcagcgaaaatcgatatatataaaattgtataatgaattattcgaaagatttattcaatctttagtttataaattaatcgatttttttctaatttcatgacatggcactaattgacttaattttgaaacaacaaaaaaggttgggactccccaacctttcacttaatctttcaataatttaattttttcaatcacgtttgttgttgaacaaccattttcaaagtttagcactttaacatcgccaccgtttgcccaaacttcttttgcgccagcaatctcttcgggtttgtaatcgccacctttgaccaaaagatctggtagaatttcgccgattaaacgttgtggtgtatcttcagtgaaaggtaccaaccagtccacggatgccaaaccagccagtaccgccatacggttttcaagattattaattggacgactttcgccttttaagcgtttaacagaatcgtcgctgtttaccgcaacaattaaacgatcgcccaatttgcgtgcattttctaaataagaaatatgccctggatgcaaaatatcgaaacagccattagtcatcacaattttttcaccgcgtgctttagcttgtgcgacagcatcttttaattctgcttcactcataatgccaaatccagtttcagggcgagcatgaatcgcattttcaagttccacggtcgaaaccgttgaagtccccaatttccccaccacaattcctgcggcaacattggctaggtaacaagattcttcgaaagaacgtccatctgctaatgcggttgctaatacgctaatgacagtgtcaccggctcccgtcacatcaaacacttcttttgcaacggttggcaaatgatagggttcttgatttgggcgtaataatgtcatgcctttttcagaacgcgtcaccaaaagtgcggttaattcaatatcagaaattaattttaaacctttctcaataatctcttcttctgtattacatttacccacaacggcttcaaattcagacatattgggtgtcaataatgtagccccacgataacgttcaaaatcagttccctttggatcgatcaacacaggcacattcgctttgcgtgcaatttgaatcattttctgaacatctttaagcgtgcctttgccgtaatcagaaagaatcaaagcaccgtaatttttcaccgcactttctaacttcgataataaatccttgcaatctacatgattgaaatcttcttcaaaatcaaggcggagcagctgttgatgacgagataaaacacgtaatttagtaatggttggatgggtttctaatgcaacaaaattacaatcaatcttttgtttttctaataagtgggaaagtgcagaacctgtctcatcttgtccaatcagccccattaactgaacaggtacattgagtgaagcaatattcatcgccacatttgcagctccacctgggcgttcttcattttcttgtacacgaactactggcactggtgcttctggtgaaatacggttggttgcaccgaaccaataacgatcaagcatcacgtcgcctaatacaagtacttttgcttgcttaaattctgctgaatattgagccattttaaaatctctctatttgaataaccaaaattgtgacgattttaccacaactcaaatttacgataaactacgcccctaacttacgtggaaagaacaatgaaaaacgaaaaactccctcaatttcaaccgcactttttagccccaaaatactggcttttttggctaggtgtggcaatttggcgaagtattttatgtcttccctatcctattttgagccatattggtcatggtctcggttggctattttcacatttaaaagtgggtaaacgtcgagcagccattgcacgccgcaatcttgaactttgttttcctgatatgtctgaaaacgaccgtgaggcgattttgcaagaaaatcttcgttcagtaggcatggcaattatcgaaactggcatggcttggttttggtcggattcacgtatcaaaaaatggtcgaaagttgaaggcttacattatctaaaagaaaatcaaaaagatggaattgttctcgtcggtgttcatttcttaacgctagaacttggcgcacgcatcattggtttacatcatcctggcattggtgtttatcgtccaaatgataatcctttgcttgattggctacaaacgcaaggtcgtttacgctctaataaagatatgcttgatcgtaaagatttacgcggaatgatcaaagctttacgccacgaagaaaccatttggtatgcgcctgatcacgattacggcagaaaaaatgccgtttttgttcccttttttgcggtgcccgacgcttgcacaaccactggtagttattatttattgaaatcttcacaaaacagcaaagtgattccatttgcgccattacgcaataaagatggctcaggctataccgtgagtatttcagtgcctgttgattttacggatttacaagatgaaacagcgattgctgcacgaatgaatcaaatcgttgaaaaggaaatcatgaaggacataacgatatatatgtggctacatcgccgttttaaaacacgtccagatgaaaatacgcctagtttatacgattaaaagtgcggtcgaatatcaccgcactttttgatagaattttctcaaattaaaaaattaacgaataatctcaccatgacaaccaattattcagctcaagaaattaccgttcttaaagatctcgaaccagtgcaaattcgcccaggaatgtacactgacactactcgccctaatcatttagcacaagaagttattgataacagcgtagatgaagcccttgcaggttttgccacaaaaattgaagtaattttgcacactgatcaatccattgaagtcacagacaatggtcgcggtatgcctgtggatattcatcctacggaaggcgtttctggcgtagaagtgatcctgactaaactgcatgctggtggtaaattctccaataaaaattatgaatttgcgggaggtttacacggtgtggggatttctgtagtgaatgcgctttctgaacgcgtggatattcaagttaaacgcaatggcgaaatctataaaattgcctttgaaaacggcagtaaagtagaagaattggaaattatcgggacttgtggcagacgcacaactggaacaactgttcacttcaaaccgaatccaaaatattttgacagcgcaaaattttccgttagccgcctacgccatttattaagagcgaaagcagtactctgctcagggcttgaaatcaaattcattgataaagtaaacaatactcaagatatttggttatatgaagatgggctttccgattaccttatcgaagcagtaaatggctttgaaacccttccggaaaaaccatttgttggcgaatttaaaggagcaaatgaagcggttagctgggcattactttggttgccagaaggtggcgaactgattggcgaaagctatgtaaacttaattccgactattcaaggcggaacacatgttaatggtctacgtcaaggtttattagatgccattcgagaattttgcgaatttagaaatctattgccacgcggggtaaaacttaccgctgatgatatttgggatcgctgttcttacattctttcccttaaaatgcaggatgcgcaattcgcagggcaaacaaaggaacgcttatcatcacgccaaagtgcggtgtttgtcagcggtgttttaaaagatgcgttcagcctatggctaaatcaaaatgtacaagatgctgaaaaattagcagaaattgccattagttctgcacaacgccgattacgtgcagcaaaaaaagttgtgcgaaaaaaactcgttagtggccctgcattaccaggaaaattagctgattgtggctcacaggatttagaaaaaacggaattatttttagtggagggcgactctgctggcggctcagcaaaacaagcacgtgatcgcgaatatcaagcgattttgccgttacgtgggaaaattttaaacacgtgggaagtttcccctgatcaagtattaggttcaaccgaaattcacgatatcgccgtggctctaggcatcgatcctgacagcaatgatttatcacaacttcgctatggtaaagtctgtattcttgcggatgctgactctgatggcctgcatattgccactctactctgcgccctgttcttacgtcattttccgaaattggtacaagacggtcacgtttacgtagcaatgccaccactttatcgcattgacttaaataaagaagtcttctacgcattagatgaaagtgaaaaagaagcgattttagatcgcttgaaaaataaaaaaggcaaaccgaatgttcaacgctttaaaggtttaggtgaaatgaacccatcgcaattgcgtgaaacaacaatggatccgaatactcgccgtctcgttcaattaacttatgatttaggggaagatcaaggctcagatacattagaactgatggatatgttattagcgaaaaaacgttccgaagaccgtaaaaattggttacaagcgaaaggcgatcaggttgatttatctgtttagactaaattaatctcagcaaatctgaattttaataaattaagaatatatcaattaacagaaacaaaaatgacaaatatcaactatgaaggcattgagcaaatgcctctacgcaccttcactgaaaaggcttatctcaactattctatgtatgtcatcatggatcgtgcgttgccttttatcggtgatggtttaaaacccgttcaacgccgtattgtatatgcgatgtctgaacttggcttaaatgctacggcaaaatacaaaaaatctgctcgtaccgtcggtgatgtacttggtaaattccatccacatggtgacagcgcttgttatgaagcgatggtgttaatggcacaacccttctcttatcgttatccgcttgtagatggtcaaggtaactggggggcgccagatgatccaaaatccttcgcagccatgcgttatacggaatctcgcctatctaaaatctctgaaatcttgttgaatgaactcggacaaggaacagtagattatcaaccaaactttgatggaaccttagctgaaccacaatatttacctgctcgtttaccgcatattttattgaacggcacaacaggtattgcagtggggatggcgacagatattccaccacacaatattaacgaaattgctgatgcggcagtaatgttgctagataatccaaaagcgagattagatgatgtacttgaaattgttcaaggcccagattttccaacagaagcggaaattatttcgccaaaatcagaaattcgtaaaatttatgagcaaggtcgtggctcaataaaaatgcgtgcaacttggaaaaaagaagacggcgagatcattatttctgcgcttccacatcaatcttctccctcaaaagttattgcacaaatagccgatcaaatgacggcaaaaaaactaccaatgctagaagatattcgagatgaagccgatcacgaaaacccaattagaattgtactagtccctcgctcaaatcgagtcgatactgatgccttaatggcacatttatttgctacaacagatcttgaaaaaagctaccgtgtaaatatgaatatgatcgggcttgatcataaacctgcggtaaaaggcttattagaaatcttaaatgaatggctcactttccgtcgcacaacggtcactcgtcgccttcaatatcgcttagataaagtactctctcgcttgcatattttagaaggcttgatgatagcctttttaaatattgatgaagttatcgaaattatacgccacgaagatgatccaaaagcagagcttatggcacgctttaatttaagcgatgaacaagccgatgccattttaaatttacgcttacgtcatttagcgaaattagaagaaaaccaactcaaagcagaacaagatgaacttgaaaaagagcggttaaatttagaagcaattttaggatcagaacgccgtttgaatacgcttatcaaaaaagaaattcaagaagatgcgaaaaaatatgccagtccacgtatgtctcaactggtcgaacgtgaagaagccaaaatgatctctgaaagtgatatgatgccagcagaaccagttactgtcatcttatcagaaatgggctgggtacgttgtgcaaaaggacacgatattgatcctaaatcattaagctacaaagctggcgatagctatctagctcacgcttgtggcaaaagtaatcaagccgttgtattcattgatagcacggggcggagttatgcactcgatccgctttcattgccttccgctcgctcccaaggcgaaccacttacaggtaaactcaatttacccactggtgcgaccattgaatatgttgtaatggccagcgaacagcaagaattattgatggcttctgatgcgggatatggttttatttgtaaatttgaagatttaattgcacgtaacaagactggaaaagccttgatttctttaccagaaaatgccaaagtgttgaagcctaaaacattgataaattctaccgcacttgttgtcgcaatcacatcagcaggcagaatgttgatttttccagcacaggatttaccggtattatcaaaaggtaaaggcaataaaatgatcactattcccgcagcgaatgcaaaagatcgtagcgaactattgacaaaattattgcttatttcagatcaagcaagtcttgaattttattctggaaaacgaaaaattgtattaaaaccagaagatctgcaaaagttccgcgcagaacgaggcagaaaaggttcgacattaccacgtggattacataccaatcttgaaattatggtaatcgagctgtaacacaacacatcacttaaacataacatagggagatccaatttatgagctatacttttagcacgtatgaaacccttgcattagcaagcttagttttgctattgggctattttttggttaaacgcattaatgtattaaaaacatttaacattccagagccagttgttggtggctttattgttgccattggtcttttaatttggcacaaaattgatggaacatcctttaacttcgataaaaatctacaaaccacaatgatgttagtgttttttacttctatcggtttaagtgccaacttttcccgtctaattaaaggcggaaagccactcgttgtatttttattcattgctgcattattaatcttaggacaaaacgttattggcattgcaagctcaatggcattaggaatccatcccgcttatggcttacttgcaggttcagtaaccttaacaggtggtcacggcactggagctgcttgggcggatacatttgcacatcaatttaatctacaaggtgcaactgaaattgccattgcctgtgcaactttcggtttagtattcggtggtatcatcggtggtcctgtcgctcgtttcttattaaatcgccaaaaacaaggcgaaaatcctgaaaatgatgaagttgatgacattcaagaagcatttgaacacccaacttataaacgtaaaattactgcacgttcattaattgaaacaattgcaatgatttcagtatgtttattaattggtcaatatttagatgtacaaacaaaaggtactgcactccaattaccaactttcgtatggtgtttattcactggtgttattgtccgcaatattttaaccaacattttccgtttccaagtagcagaatccgctattgacgtattaggtagcgtaggcttatccatctttttagcaattgctttaatgtcattaagactttgggaacttgcaggtttagcaattgacgtattaattgttctggctattcaagtagcatttatggctgcctttgcaattttcattacttatcgagcaatgggtaaagattacgatgccgtcgtattaagtgctggacactgtggttttggtttaggcgcaaccccaacagcaatcgcaaatatgcaagctgtcaccagccgttttgggccatcgcacaaagcatttttaatcgttccaatggtcggagcattctttatcgacttaatcaacgctgcgctattaaaagtttcatttgcagttgtaaatatgctcgcgtaaagtgcggttgaaattgacaatgttttagagaaatgcctttatcttgaattgataaaggcatttatttcaatataatcaattatttcagctgcaatatcaatcccacttgttttttcaatcatttctaagcctgggcttgcattcacttctaaaaccaataatccatttttcgaacgaattaaatccacgccagccacatctaaaccgatagcttttgttgcttgaatggctatctgcttttcttcatcgcttagggtaattttttcggtttttccgccacgatggcaattcgcccgaaactcaccattttgcccaattctctgcatcgttgctaccacttgatcacccatcacaaaacaacgaatatccgcattgcccgcttcttcaataaaatcttgctgtagcatagatatattggtttgcttaaaagcttccataatgctcaccgcactttgtggtttttcagctaaaattaccccaattccttgtgaaccatttagcgtttttaaaattgtcggagaactgatatgagctatcgtcgcctgagcttgcacttcactgccacctaaaagtgaattgggaacaggaacaccagccttcagcaaaagttgcaaacttttccacttatcacgtgcatttaaaaatgcctgagatgaatttaaacaaaaagtccctttgccttcaaaatgttgtaagactgaacatcccatttgcgtactcgttgtgccaaatcgaggcaaaactgcatcataatcagacaataaataaggtttcgactcagaattttcttgataaaaaatctgaaagtgcggtggattttgcgagagttttaagaaacagtgattcggatctaaaatatccatctcatgcccttgatgtttagccgcttcttttaagcgttggcaactataaagacgaggttcgcggcaaagcattagtaatttcataatatttcactcattgtctaggatgttccgtatattacacgaataaaaacactttatgtagacgataaaaatcaggtagaattgcctagaatttttaactcaaaaaaggaaatcttatgttcgttgttatttttggtcgtcctggctgcccttactgtgtgcgtgcaaaaaaccttgctgaaaaattaaaaggcgaagttgctgattttgactatcgttatgtggatattcacgcagaaggcattactaaagaagatttatcaaaatctgttggtaaaccagtagaaaccgtaccacaaatctttattgatgaaaaaccaattggtggttgcactgattttgaagcattaatgaaagaacaatttggtatcgttgcttaatttttctttttaatttatacaaaaaagccactttcaagcgaaagtggcttttttcatagaatcgttttaaccgttataacgtttaaaaattaatgtcgcatttgtaccaccaaaaccaaagctatttgacatgacagtttgtaaaccagcattttctttcgtctcagtaacgatattacaaccttcagcggcttcatctaaggtttcgatattaatacttggtgcaataaagtcattatcaagcattaataaagtataaattgcttcgtgtgcacctgcagcccctaaagagtgcccagtcattgatttagttgaagaaatcgctgggattttatcaccaaatacatttttgattgcacctaattctttcacgtcacctactggtgtagatgtgccatgtacattgatgtaatcaattggggtatcgacagttgccattgcttgtttcatacaacgctctgcaccctcaccacttggtgcaaccatatcgtaaccatcagaagttgcgccataacctacaatttcagcgtaaatttttgcaccacgagcaagtgcatgttctaattcttccacaaccacaacagcaccaccgcctgcaataacgaaaccgtcacgatttgcgtcataagcacgagatgctttttctggcgtttcattgtatttagttgaaactgcacccattgcatcaaactcagtagcacattcccaagataactcttctgcaccaccagcaaaaacgatatcttgtttgcctaattgaattaattcaaccgcatgaccaatacaatgtgcagaggttgcacaagcagaactcatagaataattcacaccacgaattttataaggtgttgctaaacaagctgaaacacttgatgccatggttttcgttacagcgtaaggaccaatcgcttttacaccgcgagggccacgaaccgcatcacaagccactaattgattatgtgcagaccccgtacctgcgccaatcactaagccagtacgatcattagaaacttgatcttctgttaagcctgcatcttcaatcgcttcacgcatagaaagataagcataagccgctgcatcacccataaaacggaacactttacgatcaatgtgctcgcttgggtttaatttgattgttccggcaacatggctacgcatattcatttctacaaactcaggcacaacttcaatacctgatttccctgcttttaatgaagccaatacttcttctttgttgttaccgatacttgaaataatcccaaagcctgtaattacagttcttctcattgcttcttccttattgttttatatgtaaaaataacgacccaaaattactacgaaataaaaatatttcaagcaataattcatttgttcgaccagttcagaaaatcgcgttattatacgcaaatttcattaggcaagaaaggaataaaaaatgacctttagcgtccaacatgctgagattcacttcaatcaaaaccatattcccgtctcagatcaattcgatgatgtctatttttctaacgaaaatggattggcagaaaccgattatgtttttctacaaggtaatcaactttgggaacgttggataacacacaaagacgctaattttgtcatcgctgaaacaggatttggtacaggattaaatttctttgcggtaaccaaattgttccgtgaatttcgccagcaacacgagaatcatcctttaaaacgcctaaattttatttcctttgaaaaatatccgctaaaaatcaccgcacttttgcaagcgcatcttgcctatccgcagtttgaagatttaagcgctcatttgcaacgttattggccttcattgattctaggttgtcatcgtattcattttgaagagaccaccttagatttatggttcggtgatgtatcagaaaacttgccacaacttggcgattatatgaatgaacgtattgatgcttggtttttagatggctttgcgccgagtaaaaatcctgaaatgtggaatgatgatctctataacttgatatttcgtttcacgaaacccaatggaacttttgccactttcaccgcagcaagtgcagtcagaaaaggacttgaatccgcaggctttaatgtgacaaaacgtaaaggcttcggcaaaaaacgagaatgtttaagtgggttaaaaatacaatcaaaatctaccgcactttcaacaccttggtatcttgctcagcctgcgaaaatggaaaaacaagatttcgctattatcggtggtggtattgcttctctttgtgcggccatttccttagtaaaacgtggggcaaaagttaccatttattgtgaagatgccgcgctcgcactcaatgcctcaggcaataaacaaggtgcattttatccgcaacttagcgatgataatgtgctcaccgttgatttctacctgcacgctttcagttacggtcgccaattacttgattgggcaatcgaacaaaacatagcgtttgaacacgaattttgtggcgtggcactatgtgcttacaacgaaaaaagtgcggttaaattaacaaagatttctcagcttggtttaccgaacgaaatcttccaaatgctgagtgctgaacaactcagtgaaaaagtgggattaccgcttaattgcgaaggcggttggattgagcaaggggcttggcttgcaccaagacaatttgttcaaaattccttttcatttcttgaaaagcagggtgtcatcattaaaaccgcacaaaaaattaccgcactttctcaagaagaaaaaggttgggaactaaaaaatatgcaaggtcaaaaatactgccatgaagtcgtcattcttgcgaacggacataaaattactgattttgttcaaacagaaaagctaccgctctaccctatccgcgggcaagtcagccaaattccaacatcagaaaacttactcaaactgaaatctgtgctttgttatgatggctatcttactccagccaatcaattaaaaacctcacattgcatcggtgcaagccatgttcgtgataatgttgatcgccattttagcgaacaagaacaacaagaaaaccaacaaaaactccaacaaaatatcgcccaaccttggacgcaagatgtgaatacatcagataatctcgctcgtgtaggcattcgttgctctgtaagagatcttgccccaatggtgggaaacgtgcctcattttgaacagcaacaagcgggttattacaatctatttaacctccgccgccgtaaacaacctattcaaagtgcggtcaattttcagaatattttcttaatcgcagccttaggttctcgcgggcttacctctgctccactcttaggcgaaaccttagcttcaatcatttatggcgagccattaccaataagcgaaggcatattacataatctttcagctaaccgagcttgggtaaaaaagtggttgaaaggttcaaaagttgaataaattcataagattcagagccttacaaaaataactttaacgtgttaaaatcaaacaaaatttaaatataaaaatgaatacaaaaatgctatgcaatcaatcaatcaatcaatcaatcaatcaatcaatcaatcaatcaatcaatcaatcaatcaatcaatcaatcaatcaatcaatcaatcaatcaatcaatcaatcaatcaatcaatcaatcaatcaatcaatcaaattgtaggatttgttaaaacttgctacaagcctgaggaagtatttcattttcttcatcagcattccattcctttttcctccattggaggaatgaccaatcaaaatgttctacttaatatttctggagttaagtttgtattacggatccctaatgccgtaaatttatcacttataaatcgagaatatgaggcattcaataatgctcaggcatatcgtgctggcttgaatgtagaaactcccgtattagatgccaaaagtggcgtaaaactgactcgttatttagaaaatagtaatactttaagtcagatacaattaaacgaacaaagttgtttgtctcaagttgtgaataatttatatcgtttacacaatagtgaatttgtttttcgtaatgtatttagcgtattcgatgagtttcgccaatatttttcattgctagaaaacaaatccgctttttatcaagctgattcgagaatggataaactttcagctgtattttggcaatttgaagaaatcaataaagacataattttacgtccgtgccacaatgatttagtccctgaaaatatgttattacaagatgatcggctattttttatcgattgggaatattcgggcttaaatgatccgctatttgatatagctactatcattgaggaagctcatttatcaaaagaagctgctgattttctattagaaacctattgcaatcagacaaataaatatcacaagacagaatttcaaatcgctcacaaacggttaaaaatccatcgcttttgccaaaatgtattgtggtttttatggacaaaagtaaaagaagaacacggcgagaattttggcgattatgcgttaaaacgcttagacgcagcatttaaactgttagaggaattgccataatgcgtggctatctctttggcatactgtccgctgtattttgggcattatctggactgttgtataatgaattgccattaagtgaatataccgcgttagggaaagtaatttcattactttttttaattgatttttgctcgttattagttatcggcatcacattatggcgaaaaagtgcggtagattttcaaggtgttttttggcaacctgcgttatctggcatattaggcggaccaataggaatgtctgcctatttattaagcattcattatttaacaatctattatgctgcaccgctttcatctctctttcctgttttcgctgcgttaatgtcttattggattctaaaagaaaaaattaccaaaacagcccaattcggattcgccttggctattatttcttcttcgttgcttgctattgaagtaggacaagaaataacctttaatactatcggttttatttttttaataatttgtatattagggtggtcatctgaaatagtgatatcctcctatacaatgcgttctctctctggacttcaggtgtattttttaagactatgtggttcaactattggttatttattgattctatttattctttccttgaaaaatttctcactagatatacttagttttaattatgtacaaattgctggtgtaataatctttggggcattatcttactgctgctattaccaagcgatttatctgttaaaaccaatcaaagcaatggcattaaatatcacatattctgtatgggcaattggacttggttatctgctctataaacagccaattaagcccattaccttactacttaccttattattaagtgcaggagtgatcgttacactttattacaaaggggaacaaaaatgaatgcaatcattttagcagcaggattaggcagtcgttttaaagacatcacacaaagcacacataaatcattgttagatattcacggcacacctaacttagaacggacactcacttttctacgtcaagcaaatatcgacaatattgtcattgttacagggtatttacacgaacaattcgagtatctaaagaaaaaatatgactgcaccttgatttacaacgaaaaatatcgcgaatataacagcatttattccttttctctggcgcaagacttctttaatgattgttatgtgattgatgcggatgtagtgcttaatcgaaatatttttctaacgaaaccatcacacagcagatatttcacagtcatccgttctaaaacgcacaatgaatggctaccgattttaaatagtaatgggcaagtaatgcgtattgagattggatcattaaaccagcctagcttgtcaggggtatcttattggacaactcgggattgcaatatcattctaactttgctcaaagaatacacaagtgaagtgcggttaaaaaatccaaaactttattgggataccattccgatggaatatatagagaaattgaatatctatacggaacaacttaacagtgatgatatatttgaaatggataaccctgatgactatcaccacattttacaaaaattgacaccaaacaaggaaaaataatgaaaaaattgactctcagagaacaacaactcgtttgtctcaatatattagattatttccacgcattatgtgagcgacaccaaattcactattctcttggtggtggaacattaatcggtgctatacgccacaaaggctttatcccttgggatgatgatattgatgtttatatgcaccgtgatgaatatcaaaggttcgttgatgtttggtttcaagaaactcacgaatactacaatatagaaacagtggaagatatccttgctcaaaagactggagaaatggcaaaaatctttgattgtcgtactcaaataaccgaaattgctggaaaaaaaagtgcaatgtttatagatatattcatctatgatggggtgccaaatgatccaaagatcatctgctcttttatgaaaaaatatagaagaactcatcgtcgtttctattcttgcaagaaaagatagttaaaggcaaaagaaaataccttatggaaagcaatacttaataaattgagccatttaatattttccaaaatgcaaaaaaatctagagcaatttcaaataacatatccgataaaacaatgcgattatattggtcttgtattatctgattatgacgattacggaggatggcaaaaatcttatatgccgaaggaatattttaaccatgttatttataaagaatttgaaggacgacaatttcaagtaatgaatggatatcacgaacacttaacacaatattatggagattatatgaagcttccaccagaagaagaccaaaagccacatcatattcaagaagcgtatattttgtaagcgaaagggcagatttaattctgccctttttcaattattacttcacttttccacaattcaaacaatacaaatactgacctttaggatcattaaatttagttaatacattcaattctttttgtaatttttgaattggagcaggcaaaccaagccatttaactaactgctcttgcgccccttttttagtatcgcgcaataaggtgctaattaaactaacgttatcatctgtaaaccattccacgctaaaatcttgcacggcagtatcttggcgttgattcactaattgctctgctttattgaccgcttcattaaaagaacctatctcatccactaaaccattttggaatgcatcactgcccaaccaaacctgaccttgagcaagtttatctacttgtgttttagaaagctggcgacctttgctgacaatttctaaaaatctgtcataaccatgctcaatttctgtttgataaatatcttgcacgggttttgctaatggagaaaacgcagatgtattagctaattcagtggttgaaacaccatctgcatgcacgcctattttcttaatactattttcgaaagtcgggaacatcgtgaaaataccgatagagcccgtaatagtgtttgcatcggcaataatataatctgcagtggatgaaatccaataaccaccagatgcagccattgcgcccatagatacgatgacaggcttaccgattttctgtaaattttctgtttcttgacggataatttcagaagcaaaagcacttccgccaggtgaattaacgcgtagaatcacggctttcacagaattgtcatcgtgggctttacgaagaattcgcgcaatggtgtcgccacctgaattttcatcatcactttctccatcaataatcgttccctcgacattcacaaccgcaattttattcggtacattgtaatgttctaaacgatcaggcagttgagtcaaataatcatcaaattcgataaggttcgcttttccatcacttcctttgccaaaaagtgcggctagttttttatctaaatccaaacgagttacaacatcagttactaatccacgttgttgtgcgtatgccgtactattgccttttaacgctttaagttctgcaagatactgtttcgcattcggcaaaatgttatctttcttaatattacgattttcactgacggataaaacataattattccacatttcgcctaaccaacgttgcatatttgcttttgcctcagccgacatatcgttgcgtaaaaatggttcaactgctgatttataagtccccacgtggaaaatatgtggtgtaacggctaatttgtcgagcatctctttaaaatacaaattctcttgcgataaaccgtgaatatccacgcttccaattgaatttaaataaatttcatcagcaaagctcgctaaataatattgtccttgtgaataattatctgcataggcgatcactggtttccctgcatctttaaagtgactgatagcaccaccaataaaatctaatgcgggcaaatctgccccttgaaaataattaagatctagcactaatcctttaattttaggatcatcttccgcttgttgaatggcaaataccacatcaaaagtcgaaatttttctagggacgtgctcgccattcaattcgcttaacgcatcttgccaacgaagtgtttcatctcggttgtccgctaaataaccatctaaattgagcaataatgcgccatcccctgttaatgttgtagatttttttccaccgcttgaaaagctaataatcgccactagcaatagtacaaagcctaaaaacacaacattcatcacaagatcacgaatgaaacacagcactttccaacaaaattttaatactcgaaacatacaaattacctttaaaaaatttgtgctagcgtatcacaaagccttgtcaaaaactatgctataatccaccgcacttttacttataagggataataaaatggatgcacttacacttttaaccacaagaaaatcaaacaaaaaattgaccgcacctgcacctaatgcagaacagcttgaacttattctccaagcagcaatgcatgtaccagatcacgggaaattacatccttatcattttattgtaatggaaaatgatggattaaataaattggaaacactactcaaagcagccgttgtggaatttgatttgggggaagaaaaattgatgaaagccgaaaacctagcacatcgtgcacctatggttattggcgtggtagcaaaaatcgatccaactatcgctaaagtgccagattgggaacaaatgttgagtgcaggttgtgcaacttatggattacaactggctgcacaagcacaaggatttgataatgtgtggatttcagggaaatgggttaatggcactgcattacgagaagctttcggatgtcgtgaacaagatcgtgtgattgcgttagtcatgattggcacaagtatggagaaagccgaacgtgaatgccgtattattgatacaaaagattttgtaacctatctataaaatattgcttgctttcctcaagacttagaggaaagcaagatattgcctactcttcttccaattcatccgccattgccgccaatatttctcgtgtaagaagggccaatgcacgataaaaaggcaaagttgcttgcgtttcaacttgagttaaaaacttcgctgcacaaggcagtaaaaaagtttcaaagaattcttgttgagccactaaagaatccgaattatcttcaagccaagaggctgtgagcaataataaagcaaaatgatccgcactttccacctctggcatattgcgtacaagacgaaaattcacaaattcttcaacatcaatgccataagctgaaatagccgtcatcactttcccattcgcaccaaataatttttgatactcttcgttcaacaaattgagatcgattttaacttgcaagctattcaacgctaattcactttctttatcagtatctaacgcccaaacttgactcaaacctttttgttgtaaccaatcaaatgcgcctgcaagaactttatctgttggagaacgataaaaaagattaccgaataatcgactaattaatgaaaaattattaatttgtttttcagacattactctttttcctttaaaagtgcggtcaattttgcttgagttttttgagcagcaagttcaatcatcgctttacgcgccttatcatcaattaaatgaatatcaccgaataattcaaactcgacattttcaattccacaataattgaataatccattaatcaaacaatgattaagcgatttatccacaccaaattctttatattgatcaacattactgccaatcgtaataaattgctgcatttgcttattttttagcaaccccactgattcgccgttttctgttttataggcaaaaccgtgacttaatacgcgatctaaatagcctttcaaaattgatgggaaccccatccaccaaaggggataaaccaacgtaattaaatctgcttgaagaataaaatcatgctcttgctgaatatcttctggaataatacctttgttagcattctgcaattcttcatgagataaaattggattgaaattcatttcataaagatcacgaaaaaatacatttacaccattttcttgactaatttgctcaatacgattggcaatcgctcgcccaaaactacgcactgaattaggatgagcaaaaataattaagtgattcatttttcttacctatttgtagggaaataaaacgtgacagaagtctatcaaaatagagcgcactttgcatataaaatcacataaaaaaagcgggcatatcccgctctcttatttgcatcatcattatgctgcatttttacgttcttcttccatacatactgccgcagtaaataatacgtcagttgatgagtttaatgctgtttcggttgagtcttgtaagataccgataatgaaaccaacaccgatcatttgcgctgctacatcatcagaaataccaaataagctacatgctaatgggattaataataatgaaccgcccgctacgccagatgcaccacaagcacaaagtgctgcaacaatacttaataaaagtgcactaacgaaagaaacttctaagcctagtgtatgaactgcggctaaagttaagatagtaatagtaatcgccgcacccgccatattaatattcgcacccaatggaatagaaacagaataagtttcttcatcaagatttaatcgttttgctaattcaatgttcactggaatatttgctgcagaactacgtgtgaagaatgcagttaccccactttcgcgtacacaagtccacactaatgggtaaggattacgacggattttccagtaaactaaaataggatttacaacaaaagcagtaaataacatcgtaccaattaatacagcaagtaattgcacataaccgcctaatgcgactaaacctttatcagataaggtttcagccactaaaccgaatacaccaaatggcgcaaaagaaataatcacgtgaacaatttttgatacaccttctgcaaaatcagataatacgttcttagttgcatcagatgcatgacgtaaagccaaacctaaaccgatagaccatgctaatacaccaataaagtttgctttgaaaattgcatttaatggattatctaccacatttaaaattaatgttagcaacacttgaccaacggcttgtggtgctgaacttgaatcttctttcgcagccaataccacttccgttgggaatgcgaaaccagcaataacagcaacaaatgcagctaagaatgttcctaaaaggtaaagcacaattatttctttcatattgcttttcgtaccaattttacggtttgcaagggcagccataacaagaaagaaaattaaaattggtgcaacggcacgcagagcttttacaaaaatcgtacctaatacgccaactttttcagcaagattaaaaccaatggtttcttgtaatggtgctgaaatcaatgcaacaacaataccaagaaccaagccagcggcaattcgttttaccaaactaccctgaaataacagactaaatagacgtgatgtgttcatatttttatctttcttttagtaaatttaacttcagattgttaccaatccacctagggggaattaaagatagcgtaaaattttaatgaaagaaaatatttttattatttttcactctaaaagtgaacttttttctaaagttattagatattctctaaaaacatacttataaaaaaattttttatttaacctattgacaccctgtatgaaatatcagtaaaatttcactgtacaaaaaaacaaggtaaaaggttatttatccatattatttaacaggagataagagaatgaacaaccaaactttggctacacaatatgaaatggatttttcttataatccactgccttttttcagtgatatagaagataaccttaaattcaacaaaaaattagatttaaatctttactgtatcaaacgtccaaaacaaacttgttttattcatataactaacccaaatatgttggcctggggaattgaaagcggcgatatgttagtcgtcgaaaaaaatgacgatctttattctggtgatcttgttgtgctagaagaaaataatgaatttcatgtctatgaatttatggcgcatagcggcaattatctttttatggcattggattccacaacacaaaatataaatacaaaagattggtcaaatttacctattatcggcaccgtaaccaatacgattcatcaaatgaaacgtcgcaataaaatgaaatgggcagcgtagttaaaagcaaataaaaaagtgcggtgaaaatcaaccgcacttctatctagtatctagattatatttcaattaattactcattactttacgtctagcaataactgcatcagaaagttgttgcaataatctttcagaatcttcccatccaatgcacgcatccgtaatactttgtccataagtctgtgctttgccatcaactaaatcttgacgaccttccactaaatggctttccaccattacgccaaagatttgtttagaaccaaatgcaatctgattacatacgtcttggcaaacatccatttgctttttatattgtttactgctgtttgcatggctaaaatcaaccataacgtgtggaatacgccctgttttttcaatatcagcacaaactttttctacatcttcagcactatagttagggcctttatctccacctcgtaaaataatatggcaatcttcattcccttttgtagaaacaattgcagaatgaccaaatttagtgacagataagaaattgtggggagcttccgccgcaccaattgcatctaaagcgactttcacaccaccattagtggcatttttaaacccaacagcacaagataaacctgaagccaactcacgatgaacttgtgattctgttgttctagccccaatcgccccccagctcataaaatctgccaaatactgaggtgtaatcatatctaaaaactcgcccgctgcaggcacaccaagatcattaatatctgaaagtaatttccgtgcaatacgcaacccatcatttaaacgataagtatcattcaaatatggatcattaattaaacctttccaacccaccgttgtacgcggtttctcaaaatacacacgcataataatttcaaggctatctttgtatttttcacgtaatggttttaaacgagtcgcatattcaatggcaactttcggatcatgaatagagcaaggcccaatcacgactaataaacgatcatctttaccatgaataatattatgtgcctcatgacgagtttgcttcactaacgccgcagcatgttcacttgctgggtatttttctaataatgcaatgggtggtaacacctgatcgactttttcaattcgcgtatcgtcgtttgccacgacaatttcaattttctctttagccatacattactctcttgctttcaaatgttgtgtttaaattatgtagctaatctacacttatttttgtactagtaaactagttcgatatgtttttttagaataaaacctacgaattccctattaaactatctttacaactcccttgcaagctgaataaaacgaaataattaagtaaataaaagataaaaaataccgcacttttgtgctgtactctcgaaattaatggctacttaatacttgtgcaggttgtaatttagcagctcggcttgctggataaaggcttgccattaaactcaatgcaagtgctgcaactaaaaccatcaaaacatccaaccagtgtaactcgcttggcaagaaatccacaaaatacacatcgcccgataataatttcttaccgataacccactcaataccttgaataaaagttgtaagatttaatgcaagtataatgcctaacacaattccaattaagcaacctttcattcctgcctgtaagccataccaaataaaaatacgtttgataaacgcattattcgccccaagcgtgcgcataatggcaatatcgccctgcttatcttttaccgccataatcagcgtagaaacaatattaaaacatgccacaccgatcacaagcaccattgcgatatacattacggttctaataagctgaatatcgcgatacatataaccaaatttactaatccaattttgcatatatagcatctgcggataatcattaagcattgataaatccagatttctcacagaaaaaggatcatctaatttcaattcaacacctgtaatttgatcaggttgataagtcaaaaaggtttgtgcttgagcaagcggcaataaggcataactataatcaagctgaccatctaagcgtaaaatagcggtaacttgcactggctcacgagttggttgagcaaattgttcatctccgttttgctgagaaataagcaaggtaatccaatcccctacttttacatcaagttctttagcgatacccgctcccaagaccaatccgccttctttctcaaatttgttccaaccttgctcttgtacaaaattgccaattgaacttaccttatcttctgcttgtttttcaacacctttgacctgaacaactttcaattttgagccattttctaccaatgccgtaaagctaacaaaaggagagattcctttaatttgtggattttgttgtaggcgtttttctaaattttgccaatgatgaattgtgggatctttcgcttgatgcacagaaaaaatctcaatatgcggcacgactgccaaaatccgttgattaagctcacgctcaaaaccattcatcgcacttaaaccaacaattaaaactgcaacacccaatgcaataccaattgcagaaaattttgcaattaacgcaactaaaggatttttttgcttgccacgttgataacgccagctaataaaaaacggcgtattcatcacgccccctccttcaaaagaccatcttgcataactaaacggcgtgataatttttccgcaagccccatatcgtgagtgactaataaaaacgcgatattttgttcttgattaagttgttgaatcagctcaaaaatactttcagtggtcttgtgatcgagatttcctgtgggttcatccgctaaaactaacgatggattattcactaaagcacgcgcaatcgccacacgctgacgttccccaccagaaagcgcagaaggacgatgggtaattctatggcttaatcccaccgcacttagcattttttcagcgcgatctttcgcttcagttttattttgatgaccaatcaacatcggcatcatcacattttcaagtgcggtaaaatccgccattaaatgatggaattggtacacaaatcctaaataacgattacgcaaagcagctaattcattagccgatgctttttgcaaggattgtccattaataaacacttccccactacttggctgatcaagtccccctaaagtatgtaataaagtacttttccctgaaccagaactccccacaatcgcaaccaactctgcaggttccatagaaaaagaaacgccttttaatacttgcgtttgattttcgccttcttgataaaatttattgatattttcgcattttaataaatagttattcattttttactcgttttaaccgcactttagcgacagataaccccatcaaaaacttgcgcgagtctatcacacttttccttgagcttaaatttcaatacacccaaagtattcaaatcctgtttcaggaaaatgtttttcaagataacgttttaaatagcgttgggtttcttgactaataataggatcatattctgggtaaccgttatacattacacttaatactgaaatacctcgagtacgacaggcctctaaacttaataatgtgtggttaatactacctaattttcccgatgtcactaaaatcaaagggtaattgtttgactggatataatctaacgtcgtcgcctcttcgcaataaggtaccattaacccaccagccccttctagcagcacataatcatatttttctgccaaaagtgcggtagatttttcaatgatttttgcttcaatttttctactttctcgctttgcagctaaatgtggcgaacaaggatattcaaaaacataagggcaggtttcgccttgtaaatcttcttccgttaaatcaatcccttgaatctttcgatgcacaagtaaatcatcagcgatatttttacaacctgtttgaatcattttttgtgtaatcacggaacagccttgttccatcaattttttagcataaatgcctgtagcaatcgtttttcccacatcagtatcaatgccagatataaaaataacctttcccataaatattccttactgattttctatgtgagaatagcgcgcgataaaaaataacggatgataagtcagacgcactttgcccgacggcatactgaacgccgacaagtaatcgccaataaatccattgagattttttcttgtccaatttttttggttcgtggctgttacgcctgtatatttaaggtgtttgagtacatctaacggcgtatcaaactctagtattaccttaaaatcctcacaccataaaagctcaaaatctttggctaaccaagtctgccattgggataaagtcgggtaatttaagcctatatttgtgatctggcggacttcttttaaattgtcttcgccaaaggttgcaaccgccaataatccgtttgttttcaagcctgttttgcaatgggcgataaaagcgtcgggttggtgaaaccattgcacggcggatgcgcttgcgattaagtcaaattgttgcaaaaaaaggaaatgttcggcatcgccgcaataaaaatcaaaggattgcggcaatttttcagccagttgggtctgcacatcgcacaaatcattaaataaccaataatccgctgaaatctgtttttgcaacaatgaactcaacataccagacccgcaaccaagctccaaaacactatctagtgacccatttggtaaataatcttgcaaatgtgtcattaacttaatattcattttttgttgaattaacgcatgttcatcatagctatttaaggctttttggaaggcgtgttgaatacgcgatttatctacggaagttaatgattccataatgccgaccagtgggtaaatcttgaaaacacataatgctcaccctctatttcccgaatcgcacaacgggatgcccaatattggtgctgattagctggcgtaaaaattttatcgcgagaactaacccatgcatttgcccagtgaataagatctatgcgtttatcctgctgaatcatcgcaaaaagtgcggtaagttcttgatgaatttcgtcaaacggacgggcgggaaatagttggtaacgttcaaaagatgctttatcgccacagattctgcgttcaaattttaaacgggtattttctgtgagattgtccagtgtcgctttaaaaatagtgtcaggaatgccaaaattgtcatcacagggcaaacctgtgccattcactgccgttgcggattttaatcttattccttgcaatgccctctctgccgcccaaacgcccatagaccacgccaccaaacggatgtgccgataggcggaaaaatcaaaatccaaatttaaatcttgataatcatagcaaattaataaatcatgatctgttggcaaaatcaaatgagctacagcatcaagaggtgtcccccagccagcaaaataaactattaaatgctcaccttgatgatcataaaatttcgttttcacattatttccttataagcatgccacaaactgtttcacttcatccattgtcatatctaccgtcaaagacaatcgtattctggatgtaccttttggtactgtcggtggtctaatcggcaagcaataataaccttgctcttgcagatctttcgccttagcaagggttgcttcgttctcgcctaaaatatagggaacgatgcaagtttggcttggcattatttgcgttctgtgttccacttcttggcgtaaaaatgcacttaactgctcaagatgagttctttcttttgaaaattgtggcaatcgttcaaaaataaaatgagtccaagccacattaaagggcggaagtgcggttgaaaaaatcaatggacgcatttgattaatcaaacattcttttaatatttgatcacagacgacataagcccccattgaagctaaggccttgccaaaagtgccaaccaataaatcaatttcggcaatcagattatcccgttcggcaatacccaatccgttttgcccataaacaccgatggcgtgggcttcatccacataaagataagtattgggaaattgtttttttaattgaacaagctgtttcaaatccgccatgtcgccgtccatactgaaaacagattcggtaacgataaaagtgcggtcaaattttccagcatttttttcgagcagactctttagatgttcataatcattatgacgataacgaaagaactcacattggcttaaacgaatgccatcaatcatgctggcatgcactaatttatctgccaaaattaaacttttcgtcgtcgtcaaagcaggcaaaatgccgatattggcgtgatagccgctgttaaataataacgcactttcccgttggaaacgttgtgcgacaagctcttccaaatcggtataaataggaaagttgcccgttaataaacgcgatgaagaactggtaaaagaggggaaattaccgccgtattgctgtaaaaaagactggcgcaagttttcatttgatgccaaacctaaataatcattagatgacatattcagcattttgcgattttctcgcgtaatatatcgtccttgatgaactaaatctggaattgaacgatattgattttgtgtacaaagctgttccagttgctgtttgaaagcatccattttttatcctaatgttcatattcctgcgttaaagccaaaatcatgccttccgttaatttctgaagttcatcatctttaatcacaaatggtggcataacataaaccaattttccgaaaggccgaatccaaacaccttgttccacaaaacgtgggactaaggttttcatatttaccgcacttttcatttcaaccaccccaatcgcccctaatgcacgaacttctttgacgtaatctttttcagataaaggcgaaagctgctgttttaaggaatgctcaattcgctgaatattttgctgccaagggctttccaacaataaacggatagattctgccgcaatcgcacaagccaacgggtttgccataaaagttggcccgtgcataaagcatttagcctcaccgcgacaaataatttgcgcaatttcagtggtcgtaatgcttgcagataaagttaaataaccacctgttaaggctttaccgatacacataatatctggcgaaatcccagcatgctcggctgcaaataatttccctgtacgaccaaatcccgtggcgatttcatcaaaaatcagcaaaacgccatattgtttacaaagtgcttgcgctttcactaaataagttggcgaataaaaatacataccgcccgcaccttgcacaacaggttctaaaatcagtgcggcgatttcattaccttttcgttcaagtaaatcagctaaaggttcaatgacacaatcattccaagattcattaaatggaatgttgggttgaggaagaaaatattgtacaggcaggctatgatgaaataaatgatgcatccctgtggttggatcacacactgacatcgcattccaagtatcgccgtgataaccagaacgaatagtggcaaatttttgtcgttgcacttctcctttagcgtgctgatattgaatagccattttcattgctacttccacagcaacagaaccactatcagcaaaaaagatcttatctaatccattgggcaaaatttgtaccaataattgagctaattccaccgcagggtcatgggtaaatccgccaaacataatatggctcatttttgctaattgattctgtgccgccgcatttaaacgaggatgattataaccgtgcaacgccgcccaccaagaggacatcccatcaatcaaacgacgaccatcttttaaagttatcattacgccatcagcacgttccaccgcataaagcggcatatcagaagaaactgaagaataaggatgccaaatatgttgtgtatcaaaagctaaaagtgattgttcatccatcatttatttaccatttactcgtatctcaaagctgctgcaggttctactttcgcagctcgataagcaggataaagggttgaaagcaaggaaagtaacagcgaaaatccaatgacaaaaatcatttgaacaaaggataattctgtcggcaagaaaacaccttgaggatttaccgcacttacaatctctgttaagttcaacgtagctaaaacacctaaaatagcaccgagcaatgtgccaacaaatcccaccagtaatccttgataaatgaacactgaacgcacttgggattttgttaagccttgagtttgcaaaatcgcaatttccccttgtttatccaccaccatcaaacttaaagaggtgacaatattggaaatcgccacaacaataatcaaactaatcagcaatcccatcatatttttttccattctcactgcttggaaaaattcgcctttttgcacacgccaatctgtgattttttgtgtcgggaaatgttgtgggagttctgtaatttggaacggatcattcagaaataaacgatagccctgcgcttgctgaggttgaatacgcattaagcgaccaatatctgtaatattagtaaaggcttcgtaaccagatgcttcgccataaccataataaatatcgctaacagtaaacaaacgctgcattggcacccgaccgaatggtgtatattggctattttccgtaatcatcaaacggattttatccccaatattcacgcccagtttttgtgccagttgatcgccgatgaccagtttaaactccccactaggtaaaatttcgttaaatttagtctgatcaaaagattcaaccaaaggatcatcagaaaataattgaatacctataatttgtcctgcactcacgccttttgccgtttgataaatcacatttgttgtattgatcggcacggctttttggacaaagtgcggtaaattttctagcgttttttctgtagaaataggctgttcttcgctcacaatcgcatgaggaatagaagatagcacctgttgtttttggtaaccttctaatccattcatcaccgaaagcacgatgatcaatgccatcacacctagcacaatccccaggcttgcaagattagtcactaatcgcccaaaacgatccgcacttttcgcacgccaataacgcaaggcgatataaagagaaataggaaaattcattatttttgatgtaattgttgtacaaattcttcgatgttttgcattactttgccaactaatgttgtcactgcactatcgctcgcccaagcaatatgcggggtgataattaaattaggcatcgtttttgcagctaaaattaacggattatctttttctggtggctcttttaccattacatccaaagccgctccgcctaaatgccccgtttttaacgcatcaactaaggcaagttcatcaatcaaaggcccacgccctgtattaatcaaaaatgcaccttttttcattttggataaggtttctgcattaattaaattctttgttgtttccgttaatgggcaatgcaacgtcacaatatccgcttgttttaatacttcatcaaagggcgtataaccttcacggcaaacagtagcatctttatgttctgcataaagtactttcattcccacggcattagccaaacgccccacttctgttcctaggcaacctttaccaaatacacccaacgttgaaccgcgcacatctgtaattggataatcaaaataacaaaattgtttactttccgcccattttgcttccgtttgatcgcgtaaccaacctgccaaactgtgttttaaagaaaaaatcagacccattacgtgttctggcacggttgtactggaataacctgtcacattacgcacggcaatgcccatttcttctgcagccacaagatcaacattatttgtacctgtcgcagtaatggcaatcagctttaattttggcagttgttgcaaagtttcacgatcaaaaatgactttgctggtaataacaatgtccgcatctttcgctcgctcaatggtttcggcagaagacgtatgatcatattcagtccaagtatgttcaaaacttgggcgaggaattgaaatatgtttaggaatagccgtgctatctaaaaatacgattttcattaattgctccttttttatatacaaagtgcggtcaaaattaaccgcacttttgatgaaatttaaattgaagtatccaattctggaaaagattttactaaatcatcgatggctttcatttgggaaacaaagccttcaagcgcagaaagtggcaatgcagaagggccatcacattttgcttgatttggatttggatgcgcttctaaaaataaacctgcaattcctactgctaaacctgaacgcgctaattcggttacttgcgcacgacgaccactcgatgccgccccaaatggatcacggcattgaagtgaatgggttacatcaaaaataacagggctacccttagaggcttttttcattacactaaagccaagcatatcaacaattaaattatcgtaaccgaagtttgaacctcgatcacaaagaataattttatcattaccacattcttcaaatttatccacgatattacccatttgacctgggcttaagaattgtggttttttcacgttaattaccgcaccagttcttgccatggcttcgactaaatcggtttgacgagccaagaatgccggtaattgaatcacatccaccacatcagcaacaggctggcattgataaatttcgtgtacatcggtaataatttttaccccgaatgtatcttttaattcttggaaaatttttaatccttcttccatgccaggtccacggtaagaatgaatagatgaacgattcgctttgtcaaaagacgctttaaatacataaggcacgccaagtttctctgtcactttcacataagcttcgcacacttgcattgccatatcacggctttccaacacgttcattccgccaaaaagcacgaaaggtttgtcgtttgcaacatcaatattgccaatttttacaattttattttgcataaattttccttaaatcaatggaggggaaaagtatctttattaatctcgcctttaagttctaaaagttgcgtgcggataaacgccgccgttggatcttttggacaatgttccacaaaaaattctaaatctttcaatgctgaaggataagcccccatttgagctaaaactaagccacggtcacggatatgataaggattttcagcatcagtaatcattaaattcttaatatagtggtatgccatatcgttatgctcttcacgaataagcgcatttttcgccagttgctcaaagcgagaataaagtaaagaaagatcggctctatcaagttcttcgggttgaattttctccccaaatccaaatgcaccttcataaagttgctgcaatttttcttgcgatatataagtgccatcccaaggatcaataaaagccacttcatctcttacttcggcacgtaaaattagctgtgttgggaaattgacaggataaattggtaaatctaatacgtcagctaaataaagcactatcgccccaagagtcactggcataccttgacgattttgaaacacataaggcaaatataaattacgagcataaaaataatcttctggatcgcaatgaaagccccaatcaccataaaatagctgtagtaactgatgaatctgctcttctttcgaccaatctggcgaaatttctttacgcgctttacgcacaagcccacccatttttccccgaagttgtgcttctaaactgccatcatcagagataacaagataaaaatgcacaaatttatcgtataacgcacgtcgataatatttcattacttcttccaaaaacctaaagtgacgcgctcattgtcgccataatcacgcacagtttcaaccatttcccaatgattttctaggaaaattgaccgcactttttcgccttgttgccatccgtgttcaagcaataatacgccattagaattcaaataactcgatgctaattcaataatatgacgtaaatcagcatacccctcatcattggcaactaatgcagaaaggggttcaaaacgcacatcgccttgatgcaaatgttcatcttgcacatcaatataaggcggattgctgacgataagatcaaacttccctgttatattatcaaaccaacggctctgcaaaaattggacatttagctgatttctttctgcattagattgagctaatgccacaacatcgggcataagatcaacaccaattatttccagcggaatatgccgcttttggcaaatgggtgcaagctcggaagccaaagcgagggcgattgcgcctgtgcctgtgccaagatcaagaatacgaaagtgcggtggattttcttccaatttttctaacgcaatttgtaatgctttctctacgagaatttcagtatctggtcttggaatcaaggtgccttttgagacatttaacggcaatgaccaaaattctttttcgccaagaatataggcgataggttcgccttttagacgacgatctaaaagtgcggtcaattttaaccgcactttttcatcaatctcagtatcatcaaaagcaaggatttgcgtacgcaatttgccagtagcatgttgaagaagcacaagtgcatcaattttactattttcagtgggatttttttgtgctaaatccgcaatcgcttgtgccaaccattctttataattcattatttttcgtcttttaacacaatcgtgccagccactaaatccgttaaagaacgacgatcatcgcgcacaagtgcaacaataccgctaataatcaataagaaacttgtccatgccaataaaatatcaataatctcacgaccgatgtatttaccaaattcaacaggctgattgatatgataattaaatacgcgcaagcctaaccagcgttttgccattgtttgaccataagttttcatgaaatataactgaaaaccagcatatacaatcgtccccactacaccggcaaaatcccccaatgcaaaaccgagaccaaccatcacccaaagcacaagcccattaatcatactcgcaagccaacgtttaaaacggctggcttgagcaggttgagaaggtttgaaagtagaagaaaattcagcatctttttgattttcaatgatcattttatttccctttaaagttaaaaaggacatctgaaatcagatgcccctatcattaattctgttcagacaatgcagccaactgatccgcttgatattcggtaataatcggctgaatcagttcatcaattttaccattcattacttcatccaaacggtaaatagtgagattgatacggtgatcggttactcgaccttgcggataattataagtacgaattttatcagaacgatcgcccgaacctaataagttacggcgcatatctgtttgttctgcagcttggcgttcttgctctgcttgaacaatacgtgacgctaataccgacattgctttcgctttatttttgtgctgtgaacgctcatcctgacattccacaacaatgcctgttggaatatgtgtaatacgcaccgcagaatccgttgtatttacgtgctgaccaccagcgcctgatgaacgataagtatcaatacgtaaatctgctggattaatttctggcatttcagattcaggcaattctggcattaccgcgacggtacaagcagaggtatgaatacgcccttgactttctgtttttggtacacgttgcacacgatgaccgcccgattcaaatttaagctggccatacacaccttcgccagtgactttaacaatcacctctttataaccgccttgctcactttcgttagcactgagcatttctacgcgccagcgtttactttcagcataacgactgtacatacggaataaatcaccggcaaaaatacccgcttcatcaccgcctgttcccgcacggatttctaaatagcagttatattcatcattaggatctttcggcagtaaaagaatttgaagttgttgttccacttcttcaatttccgctttggattcttcaatttccatttgcgccatttctttcatttcaggatcgtcgagcaatatttcagcttcttcaatattttgatttaattgcgtccagcgattaaaacatttcaccacttcttcaagttgcgaatattctttagaatacgcacggaatttatcctgatcactaattacagaaacatcgcccaataaggcttctagctcctcataacgttcttttaaactttctaattttgcaataatggaatctttcatcatttgtaagtcaccgaaaataaaatcggcgtattctagccgattttaaggaaaattgacagcgaaaaggaaattaagaatctcagacgctttatttgtgatttacccactatttattggtgtcttgtttttgattgagctcacgatatttatcacacccttcttgactacgtaaatcgcaagcatcgccaaagtattttttggctttggatttatctttttccaactcacctagcttaatgaacactttcggatctttgcttaacaccaattcttctttaattgcttcaattttttcttgaagatctgcttgttttggcaaatcaaaaacacactaaaacaaggcgacaatatgcttgctaatcctggttgccaattatgctttgttgtactctctgtaaagagagtgcaacacccagtatactgggtgtgaaatgattaaagattgaactatttaattaggagggaattggggggcttaagactgaaaaaagtgagccatcttgctcactttctgccattaaatacacatgacatcaaacttcgccagatcaatttcatcttctgtgccataaaatgccactaacgccttgcgtaacatttccgctcgttttggtaaacctttttccgcatagattttcacttgttcatacacggcttgtttaaaaggctgtgtatcgcccggattgccattcaaattatccgcgctggcaaaataacgaaaacctgccgccgttgccaaaatccactctaatgcttgcggtttaacttcaactttttcaaagtcacgctggcgttcttcagaacgtccatctggctcataccaataaccaaaatcttctagtttacgacgttctttgcctgccactaaccaatgggcaatttcgtgcaatgcactgctgtaaaagcctcgcgcaaaataaatcgcattataaagcacttcatcatttgcgggcaaataaatgggctcatcaccgcctttgactaagcgagtgttgtattcctcttcaaaacattgattaaaaattgcaataatatcttctaatttatgttccattctatcgactcctaaaaaaccgcgagattatatcaccagaggctcatttgttcttatttattttcttcaggtaaattgacatgtagtattaacggttttgcaacgagggcatttgatttctaaataaccaactatccccacttttgccaataatttgttacaaaatgtgcaacggattgctttaattgactgcatatatttctcctaatcaaaagatttgttacaatccgccagccttgcgcaaggtaggcgacgtatggctatatgcaggcttattctgcgtagctggtaacaacgagtattcctagtgccgttgttatcgccgtcttttctttactgaattaaactttgtgcagggtaaactctccttttaacttttctctttattaaatatagccgctagttgattcggactaaaccgccaaccattttccccaccgcaaatcgcattaaaacaccattcactgcaaaaatattttgagcgtttttgtttgatgcctagtacgatacctaacgcaccccaccagtcatatttacagcccaaagtgcggtcaaaataggctttgatttgtgcttcggtaactccctctagctcaattaactcccatttttctctatcataaacatcaatttgcttacaacgcacgccaccgtctcgaattgaagacgaataacactcgtacatcacttctgtttcatagtgatgcccactgaaaaatacttctttcattactgcaatttcacaatgcgaatacacgccttttgtcaatttacgagtgagccagtcactcaaacgtgccaaaagtgcgttcgggtttttacccgtttttttacctttgtataatgcgagatagattttagtgcctatcattgttgtgcctccgctagttgtcgcatttttgaaacaatatcgtcatgaatgtttttcagttcttcatcactcaacgcctcatgctttaactcatacttacgcattctttgcactgctaattgttgttgcaatgcacgtaatctttctgcttgctgaagaatcaaaagtgacgcagactgattatcaagacccgcaaccgttgcaaaactgctaatataaacgcttacttctccagcaaaatttgcttctttaaaggcaatagcggcagcttctcgctccttatactcttcggcaaaccttgtccatctagaactaatgttcgccgctgtatcatcaatgctatcaactagatttttaatgagttcacgcttaatttcagttttcttttttttatcgacaatccagctgtttccgttccatttgtgaaattctgttggttgtctatcaactagaatgtattgacttttaaaatcaataagttgtttagtctcaagctctgattcgttttctacttccatttccacaaaatcatttaagttttgcggaatagggaaaatttgataactattcaaattttcttttaaaaaataggctttcatttaacgctcctttatcgaatatcaatgcgttttacaaaacgaccagcaagatcttgaatttgtattgttgtaccgtttctatcaacagtcacagcgaatgtcttgacttctacataattcaaaaatgaaccattacggggaaatcctcgtacttgacgaacatcaagccaatgaactccgcctcctgttttaccttcaatttctgcacccacttcaaaactgacgagttcaatatcgttattatcatcaagcctgtgcctttctgatgattgaagatataaaattaacgttttaccgaagcacttctctgatagagtaatttgcccagaattcacgttaccttcccagactttttttaatgtgccaatttgagataaatcctgttttgcctgcaaaaattgctgatttatatcaacttttgcattggtgatttctcgcaaagttgattgtttattctcttctattttttgtttaacactctcagataacgcttgcatattttgtgcaagtgtacccgcatctaaagccccagcattttcaacaacaccgaatgccttcacccagaattgcacgtcatcaaatgtgttttttgctttgatgcataatttgaggattaatgatttaggacgagtttcatttccacctgttgccattgggctatctaatagcggatgcataaatccattatcactaagattatcatcagttgtagttgcagtgcgtaatcatgaatctataactgttttcgttttgtcataaaaaatattactatcacttgaattaacccagtgtgttctcactttgtgaacgtgctttttaatctcgtcactttgcgtttcaccaacagataaattgcttgatgcatttctaataaatcggtcttcagctaatggcacatttgaaatagaaccatatttaccaactaagtgacgatataactcggggtaattttgctgtgtaacggttgttctgattgaatcaaaggcaatccagccgttaggaatgttatccacggcaaaataagccgtcatccccacatcactacgggttaaatcaggaagttggttgctgtcgcccaaagtgcggtataaatcgggaaaggttttggcgttgaacgtcgaaccatcagcacgtaaaaaaccgacgggattagttaccgcacgagggaatgacaccaccgcaccaataggcacgccgtcgccgcctgtctctttccattctgaccaatttgagccattaaaaaagcgtgttttgattttgttatcatttgctttacgtgcaatttgacgcaccgcatttgttgccccaccgctcactacttcaatatgccatgccccattttcgggtagattttgaccgcttgctaagtaataattgccatcggttttatagccattggcatcgccctgcccttgttctactttaaaattcccaataccatagcctgcaagtgtattaggcttgccttcaatatccgtattaaattggggttttgccccagcgtggtagattttttgattgttatatgacaattccccatttgcccgaatacgaatggtgccgatagctcggttattttttttatactctatccagccgtcgccatcattcgcccccatatttaagagatgattagcatttgcataagtttgcgaatcagccaccccaatgccacgaaacccaatgattttagattcaaaacttttggtaccttgaatcgattcattgccccttaatcccactttgctctctgcggcagttttggcttctactgctttgtcataggcggttttcacggcttttgatgttgcagcttcggtttcgctgtcgctgttagtggacgaactaagctgaacttcgcctttttgagttaaacttgccgtctttcggttatcatcaataatcttcacaatcgcttgatataactgcgtttgtgtttctgccttcggggtaaaccccgctttttgcaacacataatgcgcttccgcttgtatatcacgtactcggtcttgcaaattattaagccacgtatcggttactcgcgtgccttgttcgcctgttgctggattaccattgtgaaaaaggccgtcattggaatcaatttgaggcattaaacttttcatatattaagatcctgtttgataagcaaaataacagtaagtatgtgcaggttttaaatctcggaagaactcctcaataatcgggtcgccaaattccactaaatgattacctgcaaaggagctacctgcacgaaaatacacaatattgtcatctccattaagcaccgatactcgccacataaaaatcaagttatcacgtgcttcattgcgaaattgagccaaatctcccgttgttggtaaatcattcgcaaggggagaaaactctttaatttcgatgcgatatccaatactttccgcaatccgtttaaaatagggaatggataagcccccaatcgcatttaacttggcaatgacacgttttactcgtgcttgatagttattgctataatctgtttttatgccgcataaacgttcccaatcggacaacatggtatcggaggtggcaggttcaataatttgcaataaatccaccgcacttttttgtaatcggtcaaaggcattaccatccacctcacattgcgctaaaaaacgttcgccattaacgtcgtacgaaataggcggataaagttttgccaatacctttttgtggtcagtttgcatcatgccatctccgtaacggtaatttgacctaatcgaaaccactcaatttttgtacgcacatctgcttttagattagtgataggtgctgtaaacttacgatcaaccacaccgaccaagttattcactaccgcttcacattgcgacacaatcaaatcatcgcctgggattaacgtattaaaataatccgcaagtgcggtggaaatcgctgccttaatttcggggaaggtcacgccactgatttttacctgaatattaaaattgacttttgttacatcaggttttaccactttgctttctcgcgcggttactgggcgcacatcatcaatatatgcttggcagcgacctattgtttcatcgcttggcacatcgttatttgatgtaatcgcaatatctaccgtaccaagcccacgacgcaacgggtaaacataagccgcatccacgccatccaccgataacgcccatgtacgatagtcataacgattaccccctgcaggtggtcggcgaataatctcaagcaagcgttcaagcaaagacgcatcgctttccgcatccgttgcaccaattacctcattgagcaccacattggattgcacgcctaaaggtgccgccataaagtttgcttttgtcgcagttttaatattttggcttgcacctgtcgcaagacttcgcacggcaacaacggcagaaccgcttgcagaaatcaccgcactttcagtggtttcataaaatcggttatcgtctgttttaatttgtaatccagctttaagtactgtatcaggggtaccagttacagttgcaccacgcccactggcataagtcgcattacgacggcgaataccacgcaaaccagcatgtttttcaagaaaatccgtgtcggcagtatcgggaaagaattgtttaataatccatttttgatgggcgtaaatcccttccgctacggcagcaaggctactggcacgtgcataatagtcactatctatgctcacatcggctctcggctctaatgactgcacatcgcgcaaaatcgcttggcgaatatctgctaaactcggcacaataaacatggtttaaaccctttttaaatgacttttaccgggtgtttaaaatgataggtttcgccccggttatctcggatagatatatctaaaatcaatacaccgttatgtggctgggtatgattgacaataatttcgtccgcacgtccatcatcaatcaagggttgcaaggcttcttcggcatattgttgtgcaattaaacctatgcgtgacaaatcttcttcgcgcggaataagatgaagcagagagcctacacgcccatctgcccaccaagagcctaatggtgtggtcaatctgatatacgctgcattggcaagcgtactgatttgtttacttgtatagtccccagtaagcgggctgatctctctgtccatattgacaggataagataagaggtaaaaagaaaggagatgcagggtttcagcatctcctttaaggttagattattcaggtttactggttttgcctccgctatcgccagtatgtttatggttacttaacgaaattatacctgctttcacgtcgccgtcggtcgtaaagctaccgccactttgctgtacattaccagtaaagcttgcaccactgccaccttgcacagccataccaccattaccattgatttgcccttgggcagtaaagacctgatcggtttcaaccagtggacttgatatatccacttttgttgcagcgttaatctttaatacatcacaatcaatctcaatcaaccgccctttttttaatacaatgctagagccactttcatcataaatagcgacttcgccgccttgcagattttttacgcggaaagaaccgttctcggtcgcaatcacaataccgtgggtagtttgtccgccaatgggtaaaatcactgcttgcgtgtttgccggaggcacagaggtaaaaccaaactgctgcataaactccacatcttgcaaggtttcatcggcaagacctgatgcctgaactttctgaatattgtccgcacttttcaccaagtgcagcacaccgcgaaaggcttgacggatttcgtccaccgcaccttgcgccctttgttgaatggcttggcttaatcgtctcatgttgtccccttaattcgcagccacccagctgccatgtccattagtcgccattaatttcttgcctttgcgcttgcgagctttttctgcttttgcactgtaagcatctggtgtccagatgccatcttgtttaaagcgtagttccgtttgtgtgccagcgtttcggctcagcgtaaaacgtcgccccattaagaaaaagatcgcatcaatctcatattcctcgcaaatcacgtgcacacgttgccctggttgccgtaatgtgccgccttgcattttgtgatcgggtacaacgatagtaagggtaaaaccttccagcatactgtccgcaatgtattttttcgcccatttttgcaaggcttccaaattatccacatcagataccaccacggttttcggcttgtaggtagtcatttcaggatcgtgataaacccatttcagatcgtttttattgtcttgcccttgcttgccgtggctttgtgcaagaaaagtgacttcgctaaaccgatttgatacatcaaacgttaaatccgactgctcaaagttgtttcgcttaccatctttcatgcaacacaaggtcgccacaggtggcgtgctgtaatccgcaccgcccacaatcagctctccatttggctcaaaccacaagtgcaagcctgccgagttcgcacaacgcattgccgcgttccatgcggtttcgcccacgtcaatatcgactttgtctaaagttggattattttccgcacgcaatgccacttttttaataccaagtggctcaacaatctttttcactgcatccaacacagtcaagcctttcacattggtaattggggcagagcaatccacaaggatgctcgcacggtcgcgcccattgaggctataagtgcggttagttttactcatagtatgctgtgtcgtatccacgatgcctgtcattaccagcttgccattaatacgcactttcacttctgctcccgaaaaatcaggtaaaacagtgctgtttgaaggcacgcccaaatcaaatttaaaggcatcggcagggattaaaaagtcactatcaatatcataacttttccagctattgtgggctttaccgtccacttccaccgtaacatcattttcataagggtaattatttgacatagctgtttaaccactctccacgctcaacaaaatttggataacggatctgcggattcaatcttaataattcatctgcacgtttgtaatcctgataaaatgcatgggcaatttgttgtaccgtcccgctaaatggcacctcacgcaccattaaaggcggtttacgattaattgccgtaagggcaagttgagtaaacttatgcactttattgcgtaattgctctgccgtattgtgcgcagccgtataaaagctcgtattaggtgtgcttaataccctgatcttttctccacgatgttcatcgtccacttgtttgcgtaataattgtaaattatccataatttgtgaccgcacttgagtcgtgatgtcatcaatatcctgtggcaataaatcatcgtcctcgaccaattcagtggcaatacgcaacaaagcaacactagaggctaactgcatcattaaatgtacagattcagtatcatccttactaaaagaggtcgttaatgatttcaacgccgcttgttctttggcagatttaatattcttaccacttaccaaatcagcaggaatatgcttaatttgacgtattgtgcgaagtacctcatcaaattttgctcgggtagttaagtccttgcgcgcagcaatttggcgcaaccctgaatcaatcattgttaccaaatcacgtacagcacggctagattttgctttaaagttatcttgtgtcacgacaggcgacacaccatacttagttttgtcaaaatcaaataacccgcgtacttgctcaaaacaaccaaataatgcgccataaacacccaacaaacgtgattttgtattcgcggcaaaggcaacaatctccataaattcgccatacaatgccatcacatcatcaacaaaattttctaattcagtcagtaaggcatctatttttgccaatagggaataattaaagacaaaaatcggtttagctggcgtagattcaataaaagtcaaatctaacaccacataatcaatcatctccgcttcgtggtgaaaactcaccccggtgcaaatcatattttgcaaacgcccacgaatcggatgcactaatgttgccacccctgatttttgtaacacgcttaaaaacttcttaaagtccgtgtaatagcctggtccataaaatacggcttgcatacgcacggttaatggatttaatcccaaatcttccacgtctgcgccattgacgaaaggataagcatgctcaatggtcgagcgatagacatcatcatccactgaaatcacatcaaaacgcacgccacgaaaactcgcacgttgcacaggcattgtccaaccagccatcttttacccccgttttaagtcttgatattgatactgagacgtttgttcagccacaatccgcccatctaaatccactttaatttcgttttgaatcgtgaaattttggctttcaatggcggtttttaatccgtcgctaatggtttgcccaaaatgctgaaaatccgcttgatagttagccaagcgagataaatctcccagtgtgcgacttaaagcggagtcggtgtcattagctgcaacagataaaccgaaatagcctttcccctgattgcgaatttccgcaattttcaccgcactttggcgcatgcgctcatcatattgtgcttgcgtgagtgtgcctcgctcaaggcgtaaagcggcaacttcatttttacgtgcaatttcagccacttcgcccgagcgagaagccgttccccatatcgaatttttgttataaccgaaaccttgcggtgcgtaatgggttgtggtcggtttattgccaccgtaagcattggcataaaattgattttctaactgcttttcttgcgcagttttggcttcggctttttcttcagccttcgcgtcttccgttctaccttgttcgccagcaattattaaaccactagcaaaaagccccccaacactaagaatactgcctaacttaccgacccctttaatttttaaaccgtttttccttttccctagattgccagcaccattcgcaatcgctgatgttgttgctgcgccttgggtcactttacctaaagcaccaccccccattttcccacccgttaataaatcaacgagagaaaacccagcaagccctgcactgaaaatttgtaatgcgtcagtcgcaccaacaacggctttggttaaatttggaaattcttccatattttcatttaaccaatctgcggcatttcctaatctgtcatttgcgccattccagtttgtttttagcaatctgaaaacgaactgaattttgttggcgcataaaatcaaaatcttctttgttgaagttgcctttttcagcaatggcatattgctcatctacattttgagccgtatttttatcacggcgcatagcaaacatagctgtacccgcttgaatatctggcatcacttcagcaagttttgtagtttccacatatttcgctatacgctctgcaatagcttgagcttctttatcgtcttttgcattattaagttgctttagcagattttgataggttctatcgcttgcaagcacctgatcaattatgctcataaaggcttcaatcgcattttttcccgttttcatttcgttagtcatggatttttcaaaatcaataccatgggttttcttggttttgggatcataaacttctaatttttcaaatttttttgctgtatcactagaacgcagttttgaaaagaaattgactaggttagttgaggtttgccccgtaccacctgataccttataaacttgttgcgcacctttaaacagctgttttaagtctggtacaacctgataacatcatttacattctaacccgaggacatcgtttacatttttcccgtaaacttatcatcaaaatacctaatccactggagattgatgatgccttggatagagaccgatgcgatgcaacagcgtgtacttttcttaaaagcgtggctaagccaacgctatactaaaactgaactgtgtcagcagtttgatattagccgtccaacggcagataaatggattaagcgccacgaacagcttggctttgagggcttaaccgagttatctcgtaaacctcatcatagccctaatgccacgccacaatggatttgtgactggcttatcagtgagaaacttaaacgtcctcactggggtgccaaaaagcttttagatagctttactcggcattttccagaggcgaaaaaaccggctgatagcacgggcgatttaattttggcgcatgcagggttagttcagcctcgtaagacgaagcgtcgtatgagtacagacacacaaccttttggcgaatgcatcgcacccaatgccacttggagtgctgacttcaagggacaatttttactcggcaatcagaagttctgctatccgctgacgattacggataatttcagtcgctttttattttgctgtaaggggttgccgaatacaaaatcagcgcccgttattgctgagtttgaacacctttttgagcaatttggtctgccggattcgattcgtaccgataacggctcaccttttgcatcgcaagcattaggtggaatcagcaaactttctaaatggtggattgacttaggtattcgtcctgaacgaattaagccatcacacccagagcaaaacggacgacacgagcgaatgcaccgtagcttaaaagcagcacttcaacctcaaaatagctttgaagctcaacagacattcttcaaccaattcttaccagaatacaacgaagaacgttcacatgaaggcattggtcgtaaaacacctgcagaatgttatgagccgtcaacgcgaatttatacaggtcacattgagccatatgactatggggataatgttgaaatccgcaaagtgaaactcagtggcgaagtcaaatggcaaggaaaaacttattatctcagccaagtgcttgccaatgaacctgtagcgttcgagccttatgccgatagcatttggcatatttattatcgctttcatttactgggcagttttgatgccaaggaaatgaaaattaaatctgccacattgtggcataaacaacctaacgaatgtaaacgatgtccttagggaaaatgtaaacgatgtttgggttgtacaatcttgtatattgtttttaatattgtcttttgtagagtcccaatttttggtactggtactagtcccattttttggtactagtcccattttttggtgctggtttaaaatcgttattttcatcaatgaaaaagttgagtgaaaactcgttaatttcaccttgtttacgttcaatattaactagatttaccgactctaattcttctattgctgcataagccgtttttcgatcttttatgccgcattgagccataaattgagaggtagaaatacgatctgaatcttttctccaacctgtagttttccgtgcaatgagcaaataacatttgattgccttgccagagagtgaatctaagtattcatcaacaaaagaatttggtatttgaaaagaatttggaagaaatcgactcatagcatcaactccgaagcataacgtgacgcgataaatggttcaagcaatgaattgtaaggttggcaatcctgctagaaaacttgtgcttttaaaactagctgataatgccaatgatgatggaatttgttttcctagttatcaatacattgccgataaatgcgaaatgtcaaaacgtagcgcgaattgattcatctgtatattccttaatgaattagccacgaaatttcctcgtggcttttttatttacccaaatacttctcacgtaaccgcttatcaaagccttgtgacgcaaggagtaacatttcaaattcacttttctcaatcgcaatgtgcgtatccgtatcaaaaacaccaaattgacaagcggcgataaagttaaatgtctgagtaaactcttcattactaataaaacgactcagtgtgctaggcgtggtttccataccttccgccacctcgtattgcttttgcttgtaatatttgtcgataacctgatccgaaagcactcttgcagatcgcgttaatttattgcgtgccattgcgtattcccgttggtaaattacagtcatgcgataatcgcagagcctgacttaataggtttgctaaagtgtcgaatttcttccgcagagacagaacctcccaaggcttgagatagaatctcggaatatcttgtctcgcctgtatattcagttcgtggtaaagaatttgatgtgcgccatttataaacagctcggacagaaagcccgcataaatcggccactttagcagcacccaaagagtcaataatatgttttaaattttccatatataatctctttaaatgaactttgggtacattttaatttagaactgaaagtacttcaagttttatttataattgaactattggttcaaaggtggatgaaatgattactgaagaaaaaattaaacagaactttgccgcacggctggacattgcgtgcaaaagaaagaacttgccagaaaaaggcaggggaaaaattattgcagatatgctgaaaattacgccaaaagccgtgagtaaatggttcaatgcggagacattgccaactcaagcaaatatttatgtattggcggattttttggaggtaacaaaagaatggctaacttatggcgataagaatgcttctattgagaaaatcgaaaagcaaatatactaccctttgctaagtccaatccaagcaggactatggactgatattagatcacttgaagggtttgacggttacgagatgatcccaagcactgccatcgcctctgaaaattccttttatctacgaattgaagggaaatctatgctcccccgattcaacgagggcgatctggttttaattgatcctgatattgtgccaacgccaggaaaattcgtggcagcaattaatggcgacaacgaggcgacatttaaacaatacaaagagcttggcacgaaaacaccagaaggcataccgcactttgagcttgttccgcttaatccaatgttcccaacattaagctcgctcaaccaagagatccgcattattggtgtggcaagagaacgcgtagaaatgttatagcgtggagtgaaaatgtgggtttaatgggttgtaatggcaacggtagaggaagtgttattggataagagaatggataaaatcatatttatcagagaaagaatggaaatggggataacccgtccctttatttgtcaaacagataaagagaattggtttatcataaaaacattgtctatgatgccaatcagtcaattattagcggaagtcataggctcaacactggctcatgaaatagggctcccgtgcccaagtattgattttgttgaaataacgccgaaatcaacccaatacgtttcttcagagtggcggcaagacttgcccaacggaatagcattcgcatcatcatttgtggtaaatgccaaaattgccaaaaccgttcaagtcaaaaatcctgcatttttatcggaaccagaacaaaaattactctatatgtttgatcgttggattttaaattctgacagaaccgcatcacaagtcggcacaggaaatattaatctgctttttgacgaacaacagcaaaaaattttagtgatagatcataatcttgcttttgacgaaagagctgatttttctgaacatatcttttcaccacagaacagagagtggcgacttgactgggtggataaacaaacttttacagacaaagctattgacacactcaaaaaatttgaccatatttatcagtccattcctgatgattggtttgttggagacggaagaatttcacaaaattgagcaccaaatcaaccgaataaaagcnnnnncattccattcattaattaattaatgaatgaatgnnnnntcctctttacacaattgaattaggtataggtataagagtatggaagaaatttgggaattattttattgagccagttaataaaattggttctggcacttttggttatgttgaaaaagtgaatgtttataataaatcacgaacccataaaacaattttcgcaaggaagtattttcgtccaagttataaaccttctgaatctgagttaaatgaacttcaagaacgatttaaacgagaagtaacctatcaagcaaagtgtttccataacaatattgtgccaatttacatgtgtaatttaaattctgcaacgccttggtttgttatggaaattgcagaaagtaatttagacgaaatcctttataacaatgattgtgtggaaggagaaagaaagttatcagaacgttataaactagatgttctgcatatggtcttaaacggcgttgcttaccttcatcagaatggctttttacaccgagatattaagcccctcaacattttgaaatatcctgatggaacttataaaatatctgattttgggttagttaaaaatctcaatagtcaatcgaaccctatcacccaaattgggcaacaaatgggaacgaataaatatatggcacctgaaattgaaaatggcatttattctcctcaatctgatatttatgctctagggattttaatggaagaattagatcttagtgaaaaatatgacgaaataatagaaaaggcaacacagagaaaacctaaaaatagatttcaatctgttaatgaaatgattgaaagaataaatcaaatagaaggaaaataagcaatgttacatttaatttcatcatcaacatattgctttccaaaagaattagtgcgcgaaaaccaagaccacattttagctccgcaaaaataccaaagcggctatcttttcgcagttgccgatggcgtaggtgggtataaaggtggagaaattgcttctcaaattgccattaaaaaccttgagcaagatccgaaaaacgtatttcaagccactttagccgaaattaaacaactgcctgaagaatatcaacgggcttcaaccactctaacctttggctatctcgcgcctgaaggcttatatatcgggcatattggtgactgtcgcttatacatcaagcaaggcaacaaattacgtcaaaaaaccaaagaccacaccacgcaccaacgcttgctagatgaaaagatttacaccaaaaaagaattaaaagagcaaccagggaaaaacatcataaccactgccatttcaacgcaagttgaaatgaagcctgatgaattttttatccctattgacgaactcaaagatgaaaacaacgaagtatttatctacattatgtcagacggtgcacaccatttttgggaacaccgcccacgcttttcagatgccacaatgcaaagtattagcagattttcagcagcattgcaaaaacgtatcgaaaaagcaccaacggatgactattcccttgttgctgtacagtttaaaatagactaacctccgccccgaaaattcggggctttttattgacaccgcccccacttcggattaagataaccacacttacttacacatagcggttatccgcacccgaaagcatagcggtttttttatgcctaaaatttaaatctgcagatctgcagatttagaaaaaagtacagaaatgtacctttcgaagatcggggcgagagagcgatatacaacacatctgaataagctccgccaactatgtgtggtaagttgaaccccgatcgcctacttaacgatcggatttcttaacttaaatcacatagggcataaaaatgtcaaacttaacaattctcaaaacttctattcgttcatacggaaatctttattcattaaacgatcttcataaagcaagtggtaatgcagaaaaacatagaccatctttattcgttcgtttagatacaactcaagatctaatttcagaaattcaaaaagaagttaaaagcacagatctgatctttaaaactactggcggtcgtgggctgcgtggaacctacgcttgtgaagaacttgtaatagcctacgcaatgtggattagtccaaaattccatttgatcgtattacgtgcgttcttagcaatgcaccgcaatcaaccgcaacaactcgcattgccagaacctgaaaagaaattcacccgtgaatttacagagcatgacctgcaacagctcgtctgggcgtggtttgctttattgcgtggcatggaactttgccaagtacttcacccagcattaaaacaaattggttcgcactacgctgcttccgtttatagcatggcttacgaatatcgcagcactctccgtcatgcccataacgtattgacacgcattacagagcaatttgaatgcgagcaaggtaataactggcgcgtattaaaatatcttcgagcctataaccctaaagcaacaggctttcagctagatattctctaaaacaccacaaaatccgaccgcacttttttaagcctgcggcggattatcacacctaaaatccgacaaaaggaacagaaaatgaacaaattaatcattacgctcgtgtgtgcatttgtagtgtatatggcgcacgccctaaatcttaatcaagactgtgacggcaaaatctgtcacgccgaacagacacaacaatattaacaaaccaccgcccttatgggcggttttttattggagtaaatatgactgaagaattactaagattaaaaaacacggcaagagtattagacattagccgctctacacttttgcgcagaatgaaatacgacaatgatttccctgcaccaataaaaatcggcagattcctctactggagatctaccgacatccaacgttatatcgactgcaaacaggcgaaaatggctaattaatccgatgttaagcacactgcagcagattctctcgccctctcctcaacaaaatccccccaccactgcatatattcgatccgttgcgttaggtacttagctttattgtaagtgcctcgcacggatgaatattcaaagtgagctaggcaaacttcaataatttcagggttgaattcggcatcattcattgcggtactaaaaatggatcgcaatccgtgggccgtcagtgtattttgataccccattctcttaatggctttgtttggggtttccttgttcattggctcatttgagtttttaaaaccggtaaaaacatacttttgattgcctgtgagtttcttcattacagcaaggacagcaagcgcttgttttgataatggcgcaataaaatcctgtatttttccaactctccccttcattttgttctttggtatgtaccaaagtttttcatcaaaattaatctcactccatttgtgttaatgcaccaacacgagtagcggtcaacaatagcaattcgattgcgcaccgaacctctaaagacattttagaggattgaagcgctgcaaagaattcaggcaatcgttctggtgggattgtcgggttattttccgctatgggccttaaaaaaccttcagataaattagcaataggattgctatgcaacaacccaatattcacgccaagggtcattattttgctcatatacccgataactcgatgtaatgtgtctagtttcccctctttttctaaatactttaatttgtttcgtgccaatggcgcagatatgttttttagctccatatgaccaaagtgcggtagcaaatggcgagtaacgcgatcgacaatatcatcataagtaacttgttttaaattccctgcttttacctcatgatgtttgaactcaaaccatttttcagcaagtgtagaaaacagattttctttttcctgtaaggtttcctgctcaataataaaattatgctcttgcggatcgatattttttgctaataggccccggtactcatcacgcttaacccgagcatccgcaagcgataattcagggtaactccctaagctaataatcgttctttttttggtgattggcttataatattgaaatcgccatatcttagagccagtaacacgaatgaataaaaatagaccatagccatcggacaaagaataatctttttcttttggcttagcttttgtaatttctgttatagtgagtggcttaacgagttttggcataggaaaccttggtattatcaatcctaaattgatggtattacatcacctttttcctgatttttagtattacaaacacagaaaaattgaagttatgatactaaatgtaatactaaaatcatgaaattgaatgatactctatgaaactctacgaaacaataaaataaacaaaaagactacaactgtttgattttatgtgatgaatggaactttatggcactttatgaaaagaaaagatggtgcgactagctggactcgaaccagtgacccccaccatgtcaaggtggtgctctaaccaactgagctatagtcgcactgtgtgaagtattcgtgattatagatatttttaacttgaacacaagtatttttcttaaaacccgatataactggcaaaaaagtaaacaaaaccagcttaaataactgagccgtttttgatttccaaaagttttaagcgtataatgtgcaccgattttttatctggctaatatatgtagcgaagtaaaataacacctttaaaattttgtaattattgacggagtaaataatgtctagaagactaagaagaacgaagattgtatgtactatgggcccatcaactgaccgtgataacaatcttgaaaaaattatcgcagcgggcgcaaacgtagttcgtatgaacttctctcacggtacacctgatgaccatatcggacgtgctgaacgtgtacgttctattgcgaaaaaattaggtaaaaccgtggcaatcttaggtgatttacaaggtcctaaaattcgtgtttctacttttaaagacggtaaaattttcttaaacgttggcgataaattcattcttgatgcagagttaccaaaaggcgaaggcactcaagaatccgttggtttagactataaaacgcttcctcaagatgttgtgccgggcgatattcttttattagatgatggccgtgttcaattaaaagtattatcaactgatggtgcaaaagttttcactgaagttactgttggtggtccattatcaaataataaaggtatcaataaattaggtggcggtttatctgcggatgccctaacagaaaaagataaagccgacattattaccgctgcacgtattggtgttgatttcttagccgtttctttccctcgttcaagtgcagatttaaattatgcacgtgaacttgctcaacaagcgggtttaaatgcaaaaatcgttgctaaagttgaacgtgcagaaaccgttgctaatgatgaagccatggacgatattattttagcatccgatgtaattatggttgctcgtggtgacttaggcgtagaaatcggcgatcctgaattagtcggtgtacagaaaaaattaattcgtcgttcacgtcaattaaatcgtgctgtaattacagcgactcaaatgatggaatcaatgattagtaacccaatgccaacgcgtgctgaagtaatggacgttgcaaacgcagtattagatggaactgatgcagttatgctttctgcagaaacagcagcaggtcaatatccttctgaaacagtggcagcaatggctagcgtatgtttaggtgcagaaaaaatgccaagcattaacgtttctcgtcaccgtatggataaagaatttgaaaccattgaagaatctgttgcgatgtctgcaatgtatgcagcaaaccacatgaaaggtgtagcggcaatcgtcactttaagtagcacaggccgtactccattattaatgtcacgcattagctctggcttaccaatctttgctttatctcgtaatcaagaaaccctaaacctttgtgcactataccgcggtgtaacaccaatttatcacggagaagaaagtcgtacagaagccggtgcaaaagcagcacttcaatcattaaaagaaaaaggttatttatctactggcgatttagtgctggtaactcaaggtggtcaaggtgcgacacaaactaacgtatgtcgtacattaattgttgaataatcaacaatctaaatatgttaaaataaaagagcggtggatttttccaccgttttttatttcctttttctaccgcacttttcacttaaacccaatagatatttgcggtatcataggcgacattctagtatcgaaataagtcctatggcatcacaacctcaaatcaaatcttcagacaaaaaaacagcacaagttagcattcctccgcactcaactgaggctgaacaagccgtgttgggtggcatcatgctgagcaatcaacattgggatggcattgctgaacgtgtgattgctgacgatttttatacttttcagcatcgtctaatttttacagaaatggaacatctaatgcgtaatcaatcgcctattgatttaattacgctagatcaagccttaagaagccgcggtgtcagcgatgaagtaggtggatttgcctatctagcagagctttctaataatactccgaacgcgattaatattttggcttatgcagatattgtgcgcgagaaagccatattacgagaacttatttcggtagggaatcgcattgctgaaaatagctattctcctaaaggtcaagacatcaaattaattcttgatgaagctgagcgtgaagtatttgcgattgcagaaaaacgaacaacttctagcgaaggcccgcagaatgtgatcaatgtgctagaaagtaccattgaaaaaatcgatattttaagcaaacttgaaaatcattcaggtgtaacgggcattacgacaggtttcactgatcttgataaaaaaacggcaggtttacaaccttctgacttaattatcgttgcggcacgtccgtcaatgggtaaaaccactttcgctatgaacctttgcgaaaatgccgcaatggcaagtgaaaaacccgttttagtatttagtttagaaatgccagcagaacaaattatgatgcgtatgatcgcttcccttgctcgcgttgatcaaactaaaatccgaacaggtcaaaatttagatgaaatcgagtggaacaaaattgccagcgtagtaggaatgttcaagcaaaaaaataatctttttatcgatgattcttcaggtctaacacctaccgatgttcgttcgcgcgcacgccgagtttatcgtgaaaatggtggattaagtatgattatggtggattatttgcaattaatgcgcgcacccgcattttcagataaccgaacactagaaatcgcagaaatttctcgttccctcaaagcactcgccaaagaattacaagtgccagtagttgccctttctcagttaaatcgtactttagaacaacgtgcagacaaacgccctgtaaattcagatttacgtgaatcaggctctattgaacaagatgcagacttgattatgtttatttaccgagacgaagtctataacgataactcggaagataaaggcgttgcagaaattattatcggtaaacagcgtaacggcccaattggtcgagtgcggttaaaatttaatggacaattctcacgcttcgacaatctcgctgaacaacgtgaatatcgagatgattattaaggaaaaataatgaacgtaaaaccggcgacagcgaaaattagctcgcacgccttaaaacaaaatttagaaataattaaacaaaaagcaccaaatagcaaaattattgctgtggttaaagcaaacgcttatggtcacggcgttgtattcgttgcttcaaccttagaacaaagcgtcgattgcttcggggtagcgcgtttagaagaggctttagcattacgctcaaacggcattactaaaccgattttattgcttgaaggcttttttaatgaacaagatttgcctattctagccgttaataatattgaaaccgtggtacacaatcacgaacagcttgaggctttaaaacgttcaaatttaccaagtccaattaaagtttggttaaaaatagatacgggaatgcaccgtttaggcgttgctcttgatgaagtggattatttttatcaagaactgaaaaaactccctcaaattcaaccgcacttaggctttgtcagccatttcagccgagccgatgaactagaatcagattacacccaacttcaaatcaatcgttttttatccgccacaaaagataaacaaggtgaacgcactatcgcagcttctggcggcattcttttctggccaaaatctcacttagaatgtatccgcccaggcattattatgtacggcatttctccaactgatactattggcaaagagtttggcttaacgccagtgatgaatttaacctcgtcattaattgccgttcgccatcataaacaaggcgatcctgtaggttacggcggtatttggacaagtccacgagataccaaaattggcgtggtcgcaatgggttatggcgatggttatccgcgcgatgtgccagaaggtacgcctgtttatttaaatggccgtcttgtaccaattgttggacgtgtgtcaatggatatgcttactgttgatttaggcgcagatagccaagatttggtaggcgatgaagtaattttatggggcaaggaattacctattgaaaccgtagctaaattcacaggcattttaagctacgagctaattacaaaattaacacctcgtgttataactgaatacgttgattaatcactgcattttttgaacagagggagtcattctccctaataaaaattccagaaagtgcggttaaaatttcaattatttttaatgaaaggaaataccatgaaaaatattaacccaactcacacccaagcgtggaaatctctcgaagcacataaagctgaattatcaaacaccaccatccaagatttatttaaacaagaaaaaaatcgttttgacgattattctttaacattcaataaccaaattcttgtcgatttttccaaaaacaacatcaatcaaacaaccctttcacatcttcgccaacttgctcaagaatgcgcgcttgatagcgcaaaagaagcgatgtttactggcgaaaaaatcaatcgtacagaaaatcgtgccgtactacataccgcactacgcaatcgcactaatacaccagtgcttgttgatggcaaagatgttatgcctgaagtcaatgctgtgttagctaaaatgaaagatttctgtcagcgtattatttctggcgaatggaaaggctatacaggcaaagccattacggatgtagtgaatattggtattggtggctctgacttagggccttatatggtaaccgaagcacttcgcccgtataaaaatcatctaaatatgcactttgtttcaaatgtcgatggtacacacattgcagaaaccttaaaaaaagtcaatccagaaacgactcttttcttagtagcatcgaaaacttttacaactcaagaaaccatgacaaatgcgcaaagtgcgcgtgattggttactgaaagcggcgaaagatgaaagtgcggttgcaaaacattttgcagcattatcaaccaatgctaaagatgtagaaaaatttggcattgataccaataacatgtttgaattttgggattgggttggcggtcgttattctttatggtcagccattggtctttcaattgcgctatcaattggctttgaaaactttgaagcgttattaaatggcgcgcatgaaatggatgaacatttccgctctactccaatcgaacaaaatatcccaaccactttagcattagttggtttatggaataccaattttcttggtgcgcaaacagaagcgatcttaccttatgatcaatatttacatcgcttcgcagcttattttcaacaaggtaatatggaatcaaatggtaaatatgtggatcgtgatggcaatgtcattaacaattatcaaactggccctatcatttggggagaacctggtacaaacggacaacacgcgttctatcaattaattcatcaaggcactactttaattccttgtgattttatcgcacccgctcaaagccataacccattggcagatcatcacaataaattgctttcaaacttctttgcacaaacagaagcattagcattcggaaaaacaaaagaggaagtcgaggctgaatttgtaaaagcggggaaatctttggatgatgtgaaaaatattgttccatttaaagtatttacgggtaataagccaactaattccattctcgttcaaaaaatcacgccatttaccttgggtgcattaattgcgatgtatgaacacaaaatcttcgtacaaggtgtgatttttaatatctttagcttcgatcaatggggtgtcgaactaggcaaacaacttgcaaacagaattcttcctgaattaacagattctgaaaaagtagcaagtcatgacagttcaacaaatggattaattaatcaatttaaagcatggcgttaattatttggatttgaataattccaagtttgtctaaaggactaaattctaatttagtcctttaaatttatcttagatagacgataaatatatattttaaatgaatttaattataaaaaatcagtaccttactaagttaagacactgattaatcatattagactttaatgctattggttatagcacagaaacatttaagcttgagccgccaccaacaatacgaactcggcgaccagctacaaaactgctgtcagccttttgaacaacaacgatctcttgaccatcatctttcttaattacaagttcagcaccgtttacttgactcattttttcttcgattttacttccagctattgcaccgccaatttgcaccactactgctnnnnncattccattcattaattaattaatgaatgaatgnnnnngcttcttttgctggagatgcgctataacatcacccgctgaaaatatcagtattgcacaacccagttacactaaaagcaactaacagtgctaatgccatatttgtttttttcatataatattctctatattagaagggaattaaagtgggtttcttggagaaaaagttgaaatgtctttagtattaccattgtcagatactaaaacacaagcaccaacaactaaagttgaatcatacttatgcacaataacaacttcctctcctttctgctggttaccagaacaatcatttttacgaacagttaattttagatttttgccttccatttgactaaaaataatttgacctttataagtcccctcctccttttgaaaagcagaaaaagcactcaagtctactgttgctaaacaacgaatgcaagtgataatttattcatttttactaaacctcaagtattttttttatagaataaggatgaaccttaatgcaagtatgatttactgttttatccgtaaaacttactgcaatagatggatttggtaatctttccccatccactttaggctcgctcactttaatggttaattgagttaatttgtcccataaaaaatacatattaacacggttaatccattcatttatcgattctttcggtaaaaatggcattacaatctcaatatgttcccatccctcaattggatattttttatttttaggaagtggaagttcaataatatccacaaattgattggcaaatttaactggtttttctaattcaataagataaatcttacgaccattaacaatattatcagataaaattctaccgcactgtaataaaagtatcagccaatttttagcactttgctcactatttacccgtaatgcaagatgatcaatttcatagtgagacagatctattgtcatttctttggctaaatgctgaatttttctttcaaatattgctaaatctgctgaaagtgcggttaaattttcctgtaaatttgtcattttgtccctttgagaaatatacaaagaacggtatcataaccgattatttttattattcaatttgaacataggaaaaaacgtgaatattcaatctattctatccgataaaattaaacaagcgatgattcttgcaggtgctgatcaatcttgcgatgcgcttattcgtcaatcaggaaaaccacaatttggcgattatcaagccaatggcattatggctgcggcaaaaaaattaggtttaaatccacgagaatttgctcaaaaagttttagataatgctcaactatctgatattgcagaaaaattagaaatcgcaggcccaggttttatcaatattttcttaaatccaacttggctaacaactgaaatttcagctgcactttcccacaaaaatttaggtattcaagctaccaataaacaaacagttgtgattgattattcatcgccaaacgtagcaaaagaaatgcacgtaggtcatttacgctctacgataatcggcgatgctgtagccagaacccttgagtttttaggtcacaatgtcatccgcgctaaccacgtaggcgactggggaacgcaattcggaatgcttattgcttatcttgaaaaaatgcaacatgaacacgccagtgaaatggaattacaagatcttgaagccttttatcgcgaagccaaaaaacattacgatgaagatgaaatattcgcagaaaaagcgcgtaattacgtcgtaaaattacaaagtggagatgaatattgtcgaacgatgtggaaacgtttagtcgatatcactatgcaacaaaatcagcacaactataatcgcttaaacgtgactttaaccgaaaaagatgtaatgggcgaaagtctttataatcctatgttaccaagcatcgtagaagatcttaaaaaacaaggtttagctgtggaaaatgatggtgcattggttgtttatttagatgaatttaaaaataaagatggcgacccaatgggtgtaatcgttcaaaaaaaagacggcggtttcctttatactacaacagatattgctgcagcaaaatatcgttatgaaacattaaaagctaatcgcgcccttgttttttcagatactcgccaaagccaacatatgcaacaagcttggttaattactcgtaaagcaggttatgtaccagatggtttctcgttagagcataaaaactttgggatgatgcttggtaaagatggcaagccatttaaaacccgtactggtggcacagtgaaattggccgatctattagatgaagccattgaacgtgccactgtattaattaatgaaaaaaataccaatttatctaatgatgaaaaagaagctgtgattgaagccgttggtattggtgcggtgaaatatgcagatctctccaaaaaccgtactactgattacgtttttgattgggataatatgttaagtttcgaaggtaacacggcaccttatatgcaatatgcctacacccgtattcgttcgatctttaataaaacagatataaattcaaccgcacttttggctgcacctttaactattaaagatgataaagaaagaacgcttgctattaaacttctacaatttgaagaagccgtgcaaactgtcggaaaagaaggcacgccgcacgtgctttgtgcttatttatatgaacttgctggcatcttctcgtcattctacgaacattgcccaattttaaatgctgaagatgagtccgtaaaattaagccgcctgaaattggcattattaacagaaaaaaccttaaaacagggtttaacgttactcggtattaaaaccgtagaaaaaatgtaatttagataattaaaatccctttcctgagaaagggattttttatacttgtttactgaataaaaaaagtgctccattggagcactactcggaaagcaaaatagatgtcggctatttaagatagcacttgtttttagtggtatcagaataaagaaatccaatcagttatgcaaatacatatttttaaatttgtgaacttggtcacgatttttttataaaaaaacaaatgtatttataataaagtgcggtaaaattctattaaaatatttccgcactttacgcccctactttaaagaatattcttttctccacgagacacactaatcaatccagaacgaacaatttctaacaatgtagtttcttctttcaatgcagaaataaacgcatcaactttatcatttgtaccgcttaattgaattgtgtaagactttggtgtgacatctacaatttgaccgcggaaaatatctgctaatcgtttaatttcatcgcgagatgaacctactgctcttactttcgctaaaacaatttctcgttctatatgttcctgctcacttaaattaaccactttaaacacatccactaatttatgaagttgtttttcgatttgctccaatgcctgagcatcgcccacagcttcaatggtcattcgagaaagcgttggatcatccgttggtgcaaccgtcaaactttcaatattaaaggcacgttgggagaataaaccaacaacacgcgataaagcaccagactcattttcgagtaaaacagataaaattctacgcattagtttgtctcctcttgaggtttacttaaaatcatttcattcattgcaccaccacgaatttgcattggataaacgtgttcagattcatctacattaatatctacaaagactaatttatttttaatactgaatgcttcttgcaatttgctttcaagttcatcgggggtagcaatttttattcctacgtgaccgtaagattctgccaatttcgcaaaatcaggcaaggaattcatataggtttgcgaatggcgaccagaataaatcaaatcttgccattgttttaccattcccaagaaatgattattcaaacaaataatgacaacaggaataccatactgcgttgcggtagaaagctcttgaatattcatttgaatactaccatcgccagtaacgcaaacaacagttccttcaggatgagctaatttcacaccaagtgccgcaggaaaaccaaaacccattgtgcctgcaccaccagaattaatccaatgacgcggttcatcgaatggataatgtaacgcagcaaacatttggtgctgacctacatcagaagccacataagcttgtcctttcgtgaggcgatataccgcttccacgacttgttgcggtttaatcacgccagaagtgcggtcaaattccaaacatttttttgctttccattggttgatttcttgccaccaactttcaagatccgtttgagattttaatccctcttcattcaataaacccaaaaattcttccaatacatttttcgcatttccgacaattggaatcgctactggcacatttttagaaattgaggttggatcaatatcaatatgaatcacttttgcatttgggcaatatttttctaaattatttgtcgtacgatcatcaaaacgaacgccaatccccaaaataagatcactttcgtgcattgccgtattcgcttctaaagtaccatgcatacccaacatacctaagaattgtttatccgtacttggataagcacccaatcccattaatgaggaagtcacgggtaaatttaaacgttgtgcaaactgaattaactgcttactacattcagcagtgattgcgccaccaccgacaaaaagtattggttttttcgctactaaaagtgcttttaatgcttttttaatttgacctttgtgtccatttactgtgggattataagaacgtaactcgacagattcagggtattcataaggatatttaaaattaggatttacagtgtcttttggaatatccacaacaacagggcctggacgacccgtagatgcaatataaaaggcttttttcaaagtagatggaatatcttccgcctttttgacaataaagctatgcttcacaacgggacgagaaatacccagcatatcacattcttggaaagcatcactgccaattaaattgctcataacctgacccgaaatgataaccataggcacagaatcggtataagccgttaaaatgccagtgatagcatttgttgcaccaggccccgaagtcactagcacacatccaactttacccgttgaacgtgcgtaaccatccgccatatgcaccgcggcttgttcgtggcgaactaaaatatgttcaataccacccagcgtatgaattgcatcataaatatctaataccgcgcctccgggataaccaaatacatactctacgccttcatcacgtaaagattgaaccaccatctctgcgccagataacttcttcatttttcactcctaaaattcaccgcacttttaaaaatacgaacagattatgtcaatgtttcacataatacaaagtaaaaaaaatttgtctagccactaaaacaacaaaaaaatcaattaaaaaaatataaaaaaccaaagataaatgaaaatttagttttttataaatttttccatcaataaaaataaaaaaatgcgacaaaatgccgcattttataaaatagtaaaaatattattttttattcaaatttttgaatgagatcacacttttagcgttttttaactgcaaatacaatgacaatcaatgaaactgccgttgctgcaaaaccagctaaacctgaataagtaaaccctaccacaatgtaaccaatagaagtcgctgttgcaactgtggcagcataaggaagctgagtagtaacgtgatcaatatgattacatttcgcgcccgttgaagacaaaattgttgtatccgacactggcgagcaatgatcgccacatacagcccctgccattactgcagataaacaaggaagcaataattctggtgcggcattcgctgccattgctgcggcaattggcaacataataccgaatgttccccagctcgtacctgttgaaaatgccattgcagaaccaagaatgaataagatcactggtaaaaattgcattggaatattaccagacacaagagaagatagatatttacctgtttgcatatcgcctacgattttattaattgtccaagcaaagaataaaattgcgattgcgcctgacattgatttaattcccacgatccaagaacgtgcatattcgggaacactcacttgacgatcaagaataattaataaagtagaaataataattgaacagaatccacctacaaccaaagatgttcctactacggtgttttcaaatgcacctaaaacactaaacactttgccatccgcagccaatgcctctgcacccgtgtaaatcatcattgacattgtagcgataattaaaactaaaataggtaatacaagattacgcacctgaccttttgtacccgtttcttcttccaactgatcttcagtattttccaaagctaatttttcgtgacgcaccattgaagcaatatcaaaagaaaaatatgccacaaaaaacaccataataatggaaaaaattgcatagaagttcattgaactcattgctacgaatgcaccaattggtgtgtactccgtgatcgaataagtcgctaataaaccacctattaaagtaataatatatgcaccccaactggaaactggcatcattacacacatcggtgctgccgttgaatctaaaatataagcaagtttcgcacgagaaactttaaaacgatctgtcacaggacgagcaattgcacctacagcgagactatggaaataatcgtcaataaaagtaacaaaaaccaatgatgccgctaataatttagcaccacgacgatctttaatacggctttgcgcccattcagcaaaggcacgattactacctgatacggttaaaagtgcggttaaaacaccaagcaataataagaacaaaacaatgttcatatttgaattgatttcaccatcggcataaaccaaagaaaccacattttttaccaaataattaaatgcgctgccgatttgccaatcgcttaacattaatgatccaataataatccccgcactaagggaaaccaaaacacggcgagttgctatcgccaaaattatcgccaacaaagcagggacgattgaccaaacagatgatgaaaaatcaataagttccattaaataatacctataattaatggagagaacggaaagcataggacagaataagaccagaacaaccgtagcactccatagttaatcagaaaaactatgacagtgtcgcccctttcgagcacgccaccaaccaaacaaaacgacttttatttgatttcggcaactattcctttcttttttcttcttcgttatccactctgaaaaaatacttataataattgcgcctctacttttgtagtgattggagagattaccgtaaaacaaacaaaatgccaacagattttataaaaattttataaacttgaataaaaatataaagaaaataaacacaaaaaaatatatctgtttagaccatttatttaataatagatatttacaataaattttattttctctattattaaataaattttcccacatttaatgttatttattgaggttattatgaacgaattagtaagaggtttaacaaatcttcgtagtttacgtgcagctgtacgtgaattaacgttagaacaagcagaaaatgccctagaaaaattacaaacagctatcgaagaaaaacgtgctaatgaagcagaattaattaaagcagagacagagcgaaaagagcgtttagctaaatataaagaattaatggaaaaagaaggtattacacctgaagaattacacgaaatttttggcacaaaaactgtatcaattcgagcaaaacgtgctccacgccctgcaaaatatgcgtttattgatgaaaatggcgagcataaaacttggacgggtcaaggtcgcacaccacgcccaattcaaaatgcgttgaacaaaggtaaatcattatctgatttcgaaatttaatttttctatttgaaactagaacctattttatgggttctatttttttatctaaacatagcacacaacattatgatcgaaaaaaaaatattactcactgattgccctgatgataaaggcttaatcgcaaaaataactaatatttgttacaaacatcaactaaatattcttcataataatgaatttgtagattttgaaaccaaacatttctttatgcgcacagaattggaaggtatttttaacgaagctactttattagaagatctaaaatatagcttacccgaagaaacgaattgtcgattaattggcacccaacgtaagcgaattgtaattttagtcaccaaagaagctcactgcctcggcgatattttaatgaaaaattattatggtgcacttgatgtagaaattgcagccgtaatcggcaatcacgataatttacgtgaacttgttgaacgttttaatattccatttcatttagttagccacgaaaacttaacccgtgtagaacacgacaaattactggcagaaaaaattgatgaatatacgccagattatattgttctcgctaaatatatgcgtgtgctaaaccctgaatttgtcgcgcgttatccaaatcgagtgattaatatccatcattcattcttgcctgcttttattggagccaagccttatcaacaagcctatgaacgcggtgtaaaaattattggcgcaacggcacattttattaataacgaattagatcaaggcccaatcattatgcaaaatgtgattaatgtggatcatacttataatgcagaagcgatgatgcgtgctggccgtgatgtggaaaaaaccgtgttaagtcgcgcccttgatctcgctttacacgatagaatttttgtttataaaaataaaacggtggtgttgtaatggaaaaaattactcttgcaccaataagtgcggttgaaggaacaattaatttaccaggttctaaaagtttatcgaatcgcgcattacttttagccgccttagctaaaggcacaacaaaagtaaccaatttattagatagcgatgatattcgacatatgcttaacgcactgaaagcattgggcgtacgctatcaactgtctgatgataaaactatttgtgaaatagagggattaggcggagcattcaatatacagaataatctttcactctttcttggcaatgctgggactgcaatgcgtccattaaccgcagcactttgcttaaaaggaaaaaccgaaagcgaaatcatcttaacgggtgaacctcgtatgaaagagcggccaattctccatttagtcgatgctttacgccaagcgggtgcagatattcgctacttagagaatgagggttaccctccgctcgcaattcgcaacaaagggataaaaggtggaaaagtcaaaattgatggttcaatttcatctcaatttttgaccgcacttttaatgtctgcaccacttgcagaaaatgacacagaaatagaaattatcggtgaactagtctctaaaccctatattgacattacccttgcaatgatgcgagattttggtgttaagattgaaaatcatcactaccaaaaattctacattaaaggcaatcaatcctatatttcgcctaataaatacttggtagaaggcgatgcatcatcagcctcttactttcttgcagctggcgccattaaaggaaaagtgaaagtaacaggcattggcaaaaattcaattcaaggcgatcgtttatttgctgatgtattagaaaaaatgggggcaaaaatcacttggggagaggattttatccaagccgaacaagctgaattaaatagtattgatatggatatgaaccacattccagatgccgcaatgacgattgcgaccaccgcacttttttccaacggcgaaaccgtcattcgcaatatttataactggcgtgtgaaagaaacagatcgattaacagcaatggcaaccgaactacgtaaaatcggtgcagaagtcgaagaaggtgaagattttattcatattcaaccgcttccactcaatcaatttaaacacgccaatattgagacctataacgatcaccgtatagcaatgtgtttttctctaatcgcactatcaaacacacctgtgacgattttagatcccaaatgtactgccaaaacctttcctacattctttagtgaatttgagaaaatttgcttaagagattaaattaaaaaagtgcggtcaatttcaaaaaggtttttaaaattaaccgcactttcattccattcttaaaaaaatcctaaataaagattatttataccgttttttcaccgcacttttatcttgctcacgtaaccgttctagtttttccttaatctgaatttccatacctctatttgtcggaaaataatattgagtgtcttttaattcaggtgggaaataattttcgcctgccgcataagcgttaggttcatcgtgagcataacgatattcagtgccatatccgagctctttcattaaattagtcggcgcattgcgtaaatgtggtggaacatcgtaatcaggtaaatctttcgcttgctgtttcgcagtgttaaatgcggtataaactgcattactttttggggctactgcaagataaataatggcttgggcgatggctcgctccccttcataagcccccactcgagtaaagcaatcccaagcagccaatgcgacttgcatagcacgaggatctgcatttcccacatcttctgaagcaatggcaagtaatcggcgcgcaacatataaagggtctccacccgctgttaaaattcttgcataccaatacagcgcagcatctggagcagaaccgcgaacagatttatgtagcgcagaaattaaatcatagaaacgatcaccttgtttatcaaatctcgcttgacgttcacctaagacttcttttaataaagtgcggtcaattttctttccattttccgtttcatctgccatatccaccattaattcgaggcaattcaaggctaatcgcgcatccccattaacatattcggcaagcacttgcagtaaattctcttctaaaattaaccgctctttacccaatcctcgttcaggatcttctacagcttgctgcaaaacttgttcaatttcagccgttgtgagtgatttcagcacatatactctggcacgagaaagcaacgcattatttagctcaaaagagggattttctgttgtcgccccaataaaaataacggttccgtcttcaatgtgcggtaaaaatgcatcttgctggcttttattaaaacgatggacttcatccacaaataagatagttttacgatccgcaagacgattttgttttgcacgctcaatggcttcacgaatttctttgataccactcgtcaccgcagaaattcgctcaacttctgcattaatacgttgcgcaataatttctgcaagcgttgtttttcctgtacctggtggcccccagaaaatcatagaatgaatatgcccagcttgaatcgcttttcgcagtggcttgccctcgccaattaaatggctttgcccaaaatattgttctagactcgttggacgcatcttggccgccagtgggcgaaaatcattttcagcaaaatcaaaattgaggttagacatttttatttctcacaaaattgaagggcgtatttctacgcccttatttcaaataatcattcattattttttgcgttgatcatcaacttcaatgcctttttctggcttgaattggaacaagctatcagacaaggtttgattagtaatattacgtaaaacataaagattggtttgtccatctttctcggtcgtactgaaatttcttaatacgccattggcatcgacgcgaatatcaaattgcttgatattactttttgaagatttatgtttcaatacgaaagtatccacttgttgcatgaccgaatattgatcccaatggcttttatcgttacttgtaagcaatacgaatggtgtgttattcacggcatctttcacccattgtgcggtcacttgttgcacaaatggatcgtagaaccataaggttttaccatcagaaataatctgggtttcttgaggggttttagtctccatacggaataaatttgggcgtttaatttgaagtttgccacttccttgttgaacatttttgccacttccagaagtcactgtttgcacaaattctgcacttaatacatcgactttagctaaacgcatttgtaattcacttgccgcatcagccaatgccaaattactcaaaccaagtaaggtaagtgcggcaaattttaaggttgtttttttcattttactttccttttaaattagtattctggacgatgcgataaaatttcacgcttaccattttgcattgggctgacaatcccttgttcttccatttgatccataatacgcgctgctcggttaaaacccacgctgaatttacgttgaatagaagatactgaagttgtaccagtattaataacaaagtccattacttcatcaaagagtggatctaattctccaccgcttgatatccctttttctgaactttcctcatcgtctgcactttctaaaattccatcaatataatcaggtttaccgcgtgctcgccaatcatcggcaatattgatgacttcatcatcactcatataggctccatgtacgcggattaaatcagatgaaccttgtccagaataaagcatatctccacgacctaaaagagcctcagcgccaccttgatcaagaatagtacgtgagtcaattttacttgccaccgtaaaggcaatgcgacttggaatatttgctttaattaaaccagtaatcacatccacagaggggcgttgtgtggctaaaattaaatggataccaatagctcgcgctttttgtgccaaccgtgcaatcagttcttcgatttgcttaccggccaccatcattaaatcagcaaactcatcgacaataaccacaatataactcaattttttcaacgctggtggcattgcatccatcgtatcgccaggtcgccaaattggatttggcacaggcattcccattgcttcgtattcatcaattttttcattaaagccttcaatgtttcgtacgcgtaaagctgaaagcaactgataacgacgttccatttcatctacgcaccaacgcaacgcattagaggcttttttcatatccgttacaactggtgtcagtaaatgcggaatatcattataaacagaaagttcgacgactttaggatcaatcataataaatttcacatcttctggttgaacacgataaagtaaacttagaatcatcgtattcacaccaacagacttacctgatcccgtagaacctgctaccaataaatgtggcatttttgctaaatcaacaatgactggtttgccactaatatctttacctaaagcaataggtaaagttgccttgctatcacggaattcattgctatctaacacatcacgtaatggcaccatttgacgatgaagatttggggtttcaataccaatataaggtttacctggaataacctctgccacacgaatagaacgaaacatcaatgctcttgctaaatcggtatcgatgctcgtgacttttgatgctttcacccccggctgtaattctaattcataacgcgtaacaacagggccaacaagcacatcttttacgctggcttttacattaaaattgcgtaattgctgttcaatacgctgtgaggtttccattatttcatctggtgtaatgcgttgttcatttggcggatattttaaaagcaaatccaaactaggtaatggtgtactcggtttttcacgttttgttgtttgctgttgaaatgcaggatgaatcaagctaccgctataacctttataattaggctcttgatttttgtctaattgaacggcttccatatcatcctctaaggatacgttaaatttcactccatctttttctaaatctaccatttcagtattcaaagattcatgactgggtcttaataaaactgttggcatttcatcttttgttagcaaagaaacttgagtaaaatcatccgcactttgattaattgctaaatcttcttgaacaactgtttttacaggcttattccaaactgcgacaaaatcatttttgcttaccctttgttcatctgaatcactcgataaattcacactaggcaagctttcagaatcaaacccaaaagaaaattgcggtttttcattctcttcgttcgcgagttcatattctgattttatagaaacctctggatttaaaccatgaatattaattaaatgcgaaggttgctcaactgagctttcttctgcctctaaagatgatttttgagtttcaatctcactattttgttctacattgagatgattttgatctagattttctgtttctgaacgatctgattttacaatcacaatttgctctaattcttccgttgatttttcttgctcagcattttctgattgctcatttttcattgttagccaatgataaaatgcaacaattaatcgaattaatgatgcgccagaacaaaaaataaaaccaattaaagcaagcacaaaaccaattaaaattgaaccaaatttacctaatacaggataaaaccaatttacaacaagcgatccgcccaatacgccgccactcaaataaaaagtattacttgataaaagcaacatactcactacacaaagcccaataatcagcatagtaaagccaaaactacgtagaataattcgagtacaggaaagctgtttaactgcttttgttttcaataaataaataggcacgagaaaagcggtgaaaggaataatatgggcaacataacctaaaaaaacaaaaaaaagatcgattatccacgccccaaatgaacctactttattaattgtgtttccatacgcactggctgttgcccaagaattatcaaggggcgtataacttgaccaagcaacaatcaaataaagtccaaaaagtgcggttaatcccagcaaaaattccgctaaatactgtcttggcgtaaatcgttctgtaatttgtttaatcatattatttcaatacaaggaaattggtttgttttacttcttccatcacaacataagtgcgcgtgtcatttacacctggtaaacgtaacaatgtcgtgcctagcaattttcggtattccgccatatctgccacacgagtttttaataaataatcaaaatcgcccgataccaaatggcattcttgaatttcttccaatgcttgaatcgctgcattaaattcttcaaacacatcgggcttaccccgtactaatgtaatttcaacaatcactaacaatggtgcatccaataattctggatttaacagtgcgcgataccccataatcacaccttgtttttccaaacgtttaactcgttctaaacaaggtgttggcgaaagccccacttttttcgacaaatcgatattggaaatcttaccgttgcgttgtaattcattcagaatttttatatctatcgcatccaatgctttatttcgttttttttccattttctttatttctttgcacataaaaaggaacaactattctacagaattttcctttcattttcagtaggcaatgatttttttataaattatctaacacagcgagcgcatccgtgagttttttcacagtaaaaacctgcatattttcgaccgcacttttcggcttgttaccaaaaggaacaatagcacgtttaaaaccgtgttttgcagcctcgctaatacgttcttgtccacttggcacaggacgaatttctcccgctaatccaacttcgccaaaaatcactaaatcttgcggcaaagggcgattacggaaacttgaaattaacgcaagcaacaaagctaaatccgcactggtttcactgacttttacaccaccaaccacatttacaaaaacatcttgatccgccatttgcaaacctccgtgtctatgtaaaaccgccagtaatagcgctaagcgattttgctctaatcccaccgcaacacggcgaggatttgccagcattgaatgatccaccaaggcttgaatttccactaaaagaggacgagtaccctcccaaagcaccataacggagctgcctgacgtaatttcatctccgcgacttaaaaagatcgccgatggatttttcacttcgcgcaaaccctgctctgtcattccaaatacacctaattcattgactgcaccaaaacggtttttatggctacgcaaagtacgataacgagaatcggcttcgccttctaatagtaatgaacagtcaatagcatgctctaacactttaggccctgcaagggttccgtctttcgtaacgtgtccaaccataataatcgccacttggcgagttttcgcataacgggtgaggaaagaagcacattcacgcacttgtgccacacttcctggcgatgattgaatatctgccaaatgcattacttggatagaatccaccacgataatttgcggttttaattgatccgccaaattacaaatctgttccacagaggtttctgacaacatttttaattgatcatttggcaatcccaatcggcttgcgcgcatcgcaacctgttgtaatgattcctctcccgttacataaagtgcggtcatattttttgccaaaccacacataacctgtagtaacaatgtactttttcctgctccaggatgccctccaattaaaatcgcactccccggtacgatcccgccgcccaaaaccctatctaattcactaaaaccactggaaaaacgaggcgtttcttgcaaactaatttcagagagcgtttgaatttttgcctgagtttcccccgcataaccactaaaacgatcattttttgattttgccgtggaaattaaccgcacttccgtgattgtattccacgctttacaagcggaacattgcccttgccaacgagaaaactccgcaccacaatcgttacatacataagctgttttcggggctttagccattttattctccgtatttgccgtgggtaagtatacccacggttaattatggttataatggttccccctttgaggaacatcaaactaccccaacggggtagcacttagattagcctagggtatacctaccctaggtcataagataattccattaatttgatcattcgctcaaaataaactcgacttttcaaaagtgcggtcaatttttcaatagttttttcattgtctttcgtttcactgtgaaaacgaatcaaatcacggatttcagcaaagattttctgattgctttctaacaaagctggtaagcgcgtttctttttgtttttctgttgccaccgcttctaagattttcccattttcatcataataatgataaagattaaaaaatgccccgactcgctccactgttttcataaaatcttggctaaaaagtgcgggagaaaatgataaggtttcttccaaaagtttctgttccattttcaacacggaattaaattttgcacaaaaatctaccgcactttcttctcgttcttcttttaaaaaatcacgccatttattgatccaatccgtcaaaaattgttttgaacctaacaaataaccccgcttcgctttactttcactactaaaataaatatctctttcgaaaggcaaaatttccacaaaatcaaaaagatcctgcacattgccagatttcaattcaaattcaatttcacaaataggctgttcatattcgcctgcaataattttgccttgatcgaatgccacttcaattttggattgttgaaattcaactaaccaaaaagtgcggttaaaatctgtggagaaaataggttgtagtgtagaactaggtaattgttcaaaagaataaagttctcttaattgcgcattggttggcgtttctttttcggttaatggtaaattatattctggacgactatgcaatccaccaacaacttcgccgttagttttaagcgttaatgtaagttcttgatcttcttgacgaatacgcaaccccattttttgtttagcaagaaaatgatcgggataatcataataggtgttacccaaaaataaattttgatgttctaaaatcgtaaattttgcaagatattgtggcaattcaatacctatttgtggcgaaatcgccaattttaattcaatttcttgtaacataatattctccatttaaattaactggttaaatatacaatacaatagaaataaatcaagatttttgtggtgttttactttacatattaaatagctataaatgaatttttatttattgtgattaaaatattgcgacttttaaataaaaaaataatccgaaaaacataaacagatttcatcggataatattgataattttaaataacaaagccagattaaaatgtgaatatttactaatctaaattagcaataattgtgaaatgtcaattaaaataagtaagatgaaaatatgaatattttcatcttactcagcattttcaaaaattttatctttgttcggggtaaattacttcagatgtaacccatttcatccatacttgctctaataatgggattattgatgtactgtcttcaaccattgtattaagtgcagacaaaacattttctaatgaatttggttgttcttgtagataacttaacaaccagtaatctaactctgaaaggatttgttgctgaatcctaaaatcactatcacgccatacaataacttgaattggcgtatcatcaaattgtttaaagtcacttgataaaaaatcaacgtcataactttttaaataagctgcaccagataattgcattacgctatgtctattccactcaaatttttcaggcactttggctaaagaaacttctgcgagtaattgtgtattttcaaaatccatcaatgccaatatatttgtatcaaatatctctttttcttgacaaaaaaagagaaattctcctgcaatatcttggaaataaggagaatgggcattaccattttgcacaaaattttctttagcatttttccaatactctggctcaatatgcaatggtgcttcaacaaaacaacgatcaataaaaccaaaagcattattacgaactaaacgtgtatataccgctaaacggcttgcagcataaccatttaaaggatctgcattacctaaccgaatagcatttgccaatgcttgctgagtttctttcaatgatgacttaggctgcataagacattacctctgtgtgagcgtatttttgctgtaattgtgcaatatgctcaacttcggcgtaaagttctgcaaatggtgggaagttaaaatcacgctccaataatgttggaggaatcgtaggtagtcgttgataggcatattcgagtaaatcccatacagtgccttttacagcttctccgtgtgtatcaattaataattcaggtaaatggcgatatgctccttttactttattaaatgattcatttgctgaattctctacaacttgtgcagcagaatgttcttcatcgtgccctgcaatatgaatgtaattaacacgtttaacatcaacttgatctaaaaagatataaggatcaagcaatccgtgattaacaccattaacataaatattattcacatctaaatgaatgccacaatcagcctcttgtgcgatagcatttaaaaattccacttcattcattgtgctagtaggagaatgcaaataataagaagtattttctaatgaaatttgtaatcctaagaaatcttgcacatcacgtattcgttgtgaaacgtgttttactgcttcttctgtaaatggcataggtaataaatcatataaatgcccttcacattcacaataacttaaatgttcagaaaagaaagacgaattatattgattaattaatgctttcgtattacggagtaattcgcgatcaagtggtgcttgcccacctaaagaaagtgaaagaccgtgtactgctaacggaaatctttctgctgcttgatcaaattgataacgtgccattccacccattttactccaattttctggtgcgacttcaataaattgaatagcgttatttgagggaagttgtaaaaaatcctcagctaaattccgacgataacctagtccagcgccttgtaatttcataattaactcctttttaataaaagctggcataaattgttacgccagcataattattattcttatttagaaccgcatttaccttcgccacatttgccttcagcagctttcggtttgctcgcaccacatttaccctcgccacatttaccttcagcagatttagctttgtctgcaccgcatttgccttcaccacatttaccttctgcagcttttgttttgacacatttatcgcccacacaaggtgttgctgtattatcagtactgcttgactttgattcagcctgtgctgctgtcgctactgccatcgttaatgcacctgctaatgctgttaatgttgctaattttttcatttgaataatctcctagagtttgaattttgaataaataattagagaaatttcaaccagcttttagttggataaaccttcttaataagcgtgtctaaagagagtttccccgctccctgcgtaattaagattaataaagtcaccacataaattaatggtaatttataaccattatcacatacgttataacctgaatcggcgtgaatgctataccacgcgacagagattaaaatcgttaaacttaatgcactaaaacgtgttagcaccccaaatatcagcaagaatgggaaaattaattctgatcccattgcaacgtgccaattaatatcggcaggaataagattaaatggaaaaggaaaacgatcttgtatttcagcgaaccaattttgtccattccatttttctaatcctgattcaaaaaactcccatgcgagaaaaaagcgtaaaatcaataaacttacgccactgccgatactttgcatcttacaatccttcatttttttacctttcaaattttctcgcttttaaagcgaaaagtgtattgagttacttatcttaccacactaggaaatattacccagttgcttacttagtcgaagataaaccttttttcttacaaatttttttgaaaaattttaactatcaacaaaaatcgggtaatatgcgcacgaatttttaaccccttaatttggagtaaatcacttatggcaatgaataatattctcggattatttgcccattcgcctctcaaaccgttacaaaaacactctgaaaaagtgaccgaatgtagcgatcttttgattcctttttttcaaactactttctcaaagaattgggaacaagcggaagaaaaacgcttagaaatttctcaatgtgaacgcgaagcagatagtttaaaacgtgaaattcgattgaaattgccacgtggtttattcttacctatcgatcgtactgatcttttagaattagtcacgcaacaagataaacttgccaattatgccaaagatattgcaggccgtatgattggtcgtcaatttggtattcctgaagaaatgcaagaagaattcttacattacgtaaaacgaagtttagatgctattcatcaagctcaccgagtaatagaagaaatggataagctattagaaacgggttttaaaggccgtgaactcaaattagtcaatgatatgattcaagaacttgattcaattgaagatgatacagaccaaatgcaaatcaaattgcgtaaaatgctttacaccatcgaaagccgttataatccaattgatgtaatgttcttatataaaattattgaatgggttggcgttttggctgaccaagcacaacgtgtcggttcgcgcattgaattaatgctcgcacgttcataatcaacaaaacataggaaataaactatggaaattattagtcaatatggttcttggttggtgtggatcacagcagcctttggcttttttatggcgttcggaattggagcgaatgatgtctcaaactcaatgggaacatcagtaggatctggtaccataaccgccaaacaagcaattattatcgcattaatttttgaatctgctggtgcctatctagcaggtggtgaagtaacacaaaccattaaaagtggtgtaatcgatccaatgcaatttgtcgatacgccagatattttagctctaggtatgctttcaaccttatttgcatcgggtgcttggttatttattgcaaccaaaatgggttggccagtttctggtacacacactattattggtgcaattattggatttgcctgtattacgattggccctagttctgtagattggtcaaagattggcagcatcgttggtagctggtttgtcacgcctgtcattgcgggtattttggcttatgcaatctttgcaagtacgcaaaaacttatttttgataccgaacaaccactaaaaaatgcaaaaaaatatggcccttattatatggggataaccgtatttgtactttgtatcgtgacgatgaaaaaaggcttaaaacacgtaggcttaaatctttcaaacagtgaaactttaatcatttcacttgccatcagtcttatcggaatgtttttcttccatttctattttaaaagcaaaaccttcactcaatcagcaaacaaaggcacttttggtgcagtagaaaaagtcttcagtattttaatgttattaaccgcttgtgcgatggcatttgcgcacggttctaatgacgtagccaatgcaattggccctctttctgcagtggtctctattgtaaatgaaggcggtaaaattgtttcaggtggagccttaacttggtggattttacccttaggtgcattaggtattgcagtaggcttaattactatgggacaaaaagtgatggcgactgttggatctgggattaccgatttaacgccaagccgtggctttgctgctcaatttgctacagcgatgaccgttgtcgtggcatcaggcacaggcttacccatctcaacaacacaaacacttgttggagctattttaggtatcggctttgcacgtggtatcgcagcactgaatttaacggttatccgaaatatcattagttcttggattgtcacattaccagcaggtgcattttttgccattattattttctatgtgctaagaactatctttaattaattgatctcaataaaaagtgcggttaattttaaccgcacttttgttgtgatgtttaaggggaaaaaatgaaaaagatctataaagccttaatctcatctttacttttaagtacatcaataaatgttgcttatgcggaaacccaatatgttactgaaaatttaagtactttcttacgtcgtggtgctggcgaacaatttaaaattgcaggttcaattcaagcaggcgaagcggtgaatgtattagaacgccaaggcaaatacacactcattcgcgacaataaaaatcgtgaagcttggattttaaattcagacttaagtagcacgccaagtagtaaagaagaaaatccaaaattaaaagcgcaagtccaagaattaaccttaaaacttagtcgtttagatggcgattggcaacagcgtaccgtcgaaatgcaacgtcgaaccaaacaagctgagcaacaaagtgcggatcttttagaacaaaattcacaattgaaacgtgaacttgaaatgaccaaaaataaaaatcgtgatttagaagcgatacttgatgcaggtaaacgagaaattgcgatccaatggtttatttatggcggttcagtattaggcgtaggcttactcttcggcttgctcattccttatgtgttaccaaaacgtcgccgtcgtgatggctgggaataatcacgaatgaaagtttatttggttggaggggctgttcgcgatcaattattggggttaccagtaaaagatcgtgattggattgtggtaggcacagaccccgctacgctactctctctcggttatcagcaagtaggcaaagattttccggtttttctcaatcctaaaacaaaagaagaatatgcgcttgcccgaacagaacgtaaatctagcgcaggttacactggctttatttgtgatttctccccaacaatcacattagaacaagatttaattcgacgagatctgactattaacgcgatggctcaaagcgaagacggtgaaattatcgatccttatggcggaaaacaagatttagaaaatcgaattttacgccatatttctcccgctttttcagaagatcctttacgtgtattgcgcgtggcacgctttgcagcccgttatcattctctcggtttcaaaattgcctcggaaacattagctctaatgacagaacttgccctatcgggagaattacaacatctcacgacggaacgcatttggctagaaacagaaaaagccttaaacgaaaaaaatcctgaaatttattttgaaaccttacataaaacaggcgcattaagcgttttattttctgaaattgatgcccttcatggggtgccaaatccagtaaaacatcatcccgaagtggacagttttattcataccatgttggtattaaaacaaacagttcatttaactgaaaataaccataatctaaacaaaagtgcggttcgttttgcggctatttgtcatgatcttggcaaggctcttacacctcaaaatattcttcctcatcattatgggcatgaacaagctggcataaaaccgactagatcattgtgcaaacgcttgaaagtcccaagttattttcaagaacttgcagaactgacttgtgaatttcacacgcatattcacaaagcctttgagcttcgagctgaaaccgtcataacgctgtttaatcgttttgatgtgtggagaaaaccacaacgctttcaagaatttctacaagtatgtctagctgatactcgaggaagaacaggttttgaaaataaagactatccacaaatagattacatcaatcaattattacactctgcaaatgaagtagatgtacagcaagttattgccgatggatttgagaaacaagcaatcaaaaatgaattaacgaaacgaagaatcttagcggttaaacaaacaaaaacgaattacccaacaaattaacaaataaaagtaactttactcaattaaactaaatccttaaaatatgcgagcttattaacttgatgaataatatgaaaacgtttaaatttctcaccgcactttttgtcactgcgattctaaccgcttgcacattagatatggaacgtcctactaatgtacaatacattgataaaacggatgcgatatggcaacaacatttacaaaagattcaaaaaattcaatcctatcaagccaaaggacaaattggttatatcagtcctacagaacgtttttctagccgctttgaatggcaataccaaaatccaaaatcttatacgcttaaactctattctttaatcagtaaatctaccctgttgattcaaatgcatcaaagcgggatgacaatttccgataacaacggtaatcaacaatctgcagccaatgcgaaacaattattacaagagatcattggaatggacattcctttagaacatttagtttattggttgaaaggccaaccagcaatgaatgcagattatcaagtgggtaccaaccatttacttggtgcatttacttatcatgtggatggttctcaatggacggcagattatctaacctatcactcaaataattcgatgcctgaaaatattttgctgaaaaatgacagcacaaaacaaaccttaaaaattcgcgtagacgagtggatttactaatgaatacattaatgaaatcacatcaattttctaccgcactttgccaaaatacaacacaatcaaatgggcagccattacgcttccctagccctgccaaactgaatttatttctttatatcaatggaaaattgccgaacggctatcatgaattacaaacgcttttccaatttttagattttggcgattggttagacattagtattcgggaacaagataatcaaattgttttaacgccagaaattccaaatctaaaaacggaaaataatctaatttatcgagccgcaaaacttttacaagaaaaagccaatattcaattgggtgcaaatattcatttagataaaattcttccaatgggaggcggtgttggtggtggttcatccaatgcagcaaccgcattggtcgctttaaattatttatggcaagccaatttatccattgatgaactggcaaaattgggattaacattaggcgcggatgtgccaatatttgtatacggacaggctgcttttgctgaaggcgttggggaaaaaatcacttattgtgaacctgccgaaaaatggtttgttatattaaaacccgatgattcaatatcgacggctgtcatctttcaagatccaaatttaccacgtaatacaccgaaaaaatccctaaaacaacttttgagtgaaccttataaaaacgattgcgaaaaagttgtgataaatcattattcaaacgttgaaaaagcgttaaactggttgctacaatatgcgccggcaagattaacaggaacgggagcctgtgtttttgctgaatttgatcatgaagcagaagcgcaagcggtatttagaaaaaaaccagaagcattttttggtttcgtcgctaaaggactcaatgtgtctcccttgcacgcaatgttgaagcagctatcatcaactcatactcatcgacaatctaaacctgaggttttataaaatgcctgacattaaactcttcgcgggtaatgctacacctgaacttgcaaaacgtatttctgaacgtttatatatttcactaggcgatgcaacagtcgctcgtttcagcgatggagaaattcaagttcaaattaatgaaaatgtgcgtggtgcggatgtatttatcatccaatcaacttgtgcgccaaccaatgataacttgatggaattggttgtgatggtagatgcgttacgtcgcgcatctgctggtcgtattactgccgtgattccttatttcggctatgctcgccaagatcgtcgtgttcgttctgctcgtgtgcctattaccgctaaagttgtggcagatttactttcaattgttggtattgaccgtgtcttaacctgtgacctacacgcagaacaaatccaaggtttctttgatgttcccgtagacaacgtatttggttcgccagttttaattcacgatattttgaaaaaatctgatcttgaaaatccaattgttgtttccccagatattggcggcgttgtgcgtgctcgcgctgtcgctaaattattaaacgatacggatatggctattattgacaaacgtcgccctcgtgcaaatgtagcacaagtgatgcatattatcggtgatattgcagaccgtgattgtattttggttgatgatatgattgatactggcggtacgctttgtaaagcggcagaagcattaaaagaacgtggtgcaaaacgtgtttttgcttatgcaactcacgccgttttctctggtgcagcagccaaaaatttagccagcgatgccattgatgaagttgtagttactgacacgattcctctatcagaagaaatgaaagcgatcggtaaagttcgcgtgcttacgctttcttccatgctggcagaagccattcgccgcattagcaacgaagaatctatttctgcgatgtttaactaaattaaaatttcaataaaaaataccgcacttttattgccaaagtgcggtatttttttatctattttattccacagtcacacgcgcaaattttcgtttacccacttggtaaacatttgtgcctttcggtgcattatcttttacgttatcgactttttcaccattgatttttacaccgccttgttgagcagagcgaatcgcttcagaagtggaaggaacaagacccgcttcttttaataaggtggctaaaccaatttcgccagaaaacgtaaattcaggcatttcatcaggcattgcgcctttttggaaacggttaataaattcttgttctgcagcgtttgctgcctcttcattgtggaaacgtgcaattaattcttttgctaataagatttttacatcacgtggatttttgccgttttctacttccgattttaattgtgcaatttcacttaatggacggaatgaaagaaggttataccaatcccacatgagttcatcagaaattgacatcactttaccgaacatatcgcttggtgcttccgttacgccaatatagttaccaagtgatttagacatttttttctcgccgtctaagccaacgagtaatgggagtgtaatcgcaacctgtggttttttgcctgctgatttttgtaattcacgaccaacaagtaagttgaatttttggtctgtaccgcctagttccacatctgcatctaatgcaacggaatcgtagccttgcagtaatggataaataaattcatggatggcaatgggttggttgttgccaaagcgttttttgaagtcgtcgcgttcaagcatacgcgcaaccgtatagttgcttgcaaggcgaatcataccttctgtaccaagtttgcttaaccattcagagttgaagacgattttggttttttgaggatcgagaattttataaatttgctctttataggtttccgcattgcgcaatacatcttcacggctaagtggaggacgagtcgcatttttacctgatggatcgcccaccattccagtaaaatcgccaattaagaaatagacttcatgaccgagttgttgaaattgacgtaatttgtttaatacaacagtatgtcctaaatgaatatctggtgcagttggatctgcgcctaattttacttttaatgggcgattttctttcaatttttcgattaaatccgcttctgaaaggatttcatcagtaccacgctttagttccgcgagaacggtattaatgtcagtcattattatttcctaattatgttttttgaaaggtttcattatagggattcttagcaatttgtgaataaaaaaaacgcctatttgtggggaaataggcgggaatgttggagtgattatctaatattgttgttggaatgattagatgataattgttatcaataactttgtcaataaataaatgaaaataattctcaaaaaatattattttatataaggcaccgattctgtcaaagaaagtgcggtaggaatttcattagaaatttcaaattgtcccgcataagcataggcttcaacaccttgttccattgcttcttttaataagcgatcatattcaggatcgatatattccgcaattttgaaacgatcaaacccattatgtaacccagcaaatagcactactgctcgatgaccttgttttttcattgccaataattctcgaacgtgtttttgtccacgcgtagtaaccgcatcgggaaacatacctaaattgccttttacaagcgtgattgatttcacttctacataacaatcaagcaagccttcgccttttagtaagaaatcaattcggctattttcttcgccgtatttcacttcagggtaaatttcatcatacattgccaattctttgatttgcttattttgcaatgcttcaaagacaagctgattagaacgatgggtattgatacagcaaagttgtccatttgcgagttgagtaagctcccaagaatggggatatttacgagtttgactatcggaatgtgaataccaaattgtgtcgcctttctctccgcacccagtcatcgcacctgtattggcacaatgaattgtcataacatcaccagttggcaattcaatatccgcaagaaagcgtttgtaacgacgaattaattttgccgattgtaaagctggaagttgcataaagttccttatttaagtttttctaaacgttgtaaaatagcgttgtcgttcatagcttgcatttttttcattctcaaagaaagtaagatcgccgcaaaagtgagcgagaccacaaaggcaatccagaaacctttcgcatcaatgtgtggcacaagccaatctgtacgaccgagcgtataaccaagtggcacaccaattacccaataagagaaaagagtaatatataaaatcattttggtatctttataaccacgtaaaatgccaccaaccaccatttgaatggtatctgaaaattgataaagtgcggcaaataataataaatttgccgccattgcaatgacaatttcatctgttacgaaaatagaggcaatttcataacggaaaaaaatcgtaattaatgcagtaataattgtcacagttagccctaataataatgcggcatagccaattttcttcgcattttgtggagaacctgcacccaatgcttgtccaactaaaatcgtcgttgccataccaatcgacatagggaacataaaaataaaagaactggtattcaatgtgatttgatggcttgcgacaatagttgcacccaacggagaaagcattaaggacgtaagtgcatataacgccacttcgcaacaaattgcaatggcaatgggtaatcctaaacgcagtaattttttaagtgttttcggatttggcatttcaattaattgactaaatacttttagtgaacgttcttgagtattcgtgtaggaatagaaaatcatcattaagcacattgcccagttcacaatagctgtcgcaataccacagcccaccgcaccaaaagcaggcataccaaattttccataaataaaaatgtaattaagcggaatattaatcaataaacctaaaaaggtaatgaccatcgcaggcttggttttctcaatcccatcatttaaacaacgaaaattaatcagcatcaaataagctggcaatccccacaacatggcatgtaaataatcgcgtgctaaatctgacattttgctttccatttgcatatattgcagcggaatttcacagaaataaatcagtaaacctaaaggaatactcacgcctaacacaagccaaatgccttggcgaacttgatgtgcaatgcgatggtgttggcctgaaccattcaaataagaaattgtaggcggcaatgccaacaataaaccttgcccaaaaaacatcaatggcatccaaattgaagcaccaatagaaatggctgccatatcagtggaactcactcgccccgccataatggtatccgctaatcccattgagttttgtgcaatttgcgctaataaaataggcaaggaaattttaatcaactttttaatatcagcgtggtattgagataaaagacgaaaattcataaatttgatatactgctaaaaatttttagaaaaggaaaaaattatgtttactggaattgtccaaggcaccgtccctatccactccattaaagaaaaggctaattttagaacacaagtagtaaaattaccacctgaaatgcgtaaagatctggaaattggcgcatcagtagcaaataacggcgtatgtttaactgtaactgaaattaacggcgatctggttagctttgatctgatgcaagaaaccttaagaattacaaatctcggcacagtaaaagtgggcgattatgtgaatatcgaacgtgctatgcaaatgggaacggaaattggcggacatttattatctggtcatatttattgcaccgcaaaaatttcagatattatcgctagtgaaaataaccgacaaatttggttcgagctgccaagcgcagatgtaatgaaatatattttaacgaaaggatttgttgcggtagatggcattagcctcactattggcgaagtaagagacacacaattctgtgtgaatttaattcctgaaaccttgcaaagaactttaatggggcaacgtaaagtgggcgatattgtgaatattgaaatcgatcctcaaacgcaagccattgtagatacggtagaaaattatttgcagtcaaaaaatttttagttcatttaaaaatattcggtaattgaatagagaataggcataaagcctattctcacatcatcaagtattactgcaacgctttctcaattttttcaaataaatcttttgacagattttctacaacgcttaggcgttctaaagcacgtttcatcagcgtttggcgttgggcatcaaagcgagaaaaacgaattaatggctcgattaaacgcgcagccacttgcggattactttcatttaaacggattaacacatccgttaagaaacgatagccagaaccgcttacgttgtgaaatgcttttaaattgtgatttgcaaagctacctactaatgcacgtaaacggtttggattattaaagttaaaacttgggtgatccattaataactgaataatttccaacacattatcatctgggcgagtggcttgtaatgcaaaccatttatccatgactaatccatcgtgttgccatttttgttcaaaatcagctaataacacatctctgcaaagtaatgcagctttagttgcaacacttaatgccgccaatgtatctgtcatattattcgcattattgtagtgtttttggactaggttgttgcccaaattggtgtaagccaaataagttaagcaaagattacgcattgcacgcaaggcgatgtcttgttgcgtaacttgataatcatcgagacgaatatgggtgtaaacacgcaagaaatcatcttttaaagtttcagcaatttgcgcttgcataaatgctcttgcggctgaaataccatcaggatcgatggttttgaacccctcggcaaattccatttctttcggcagtgtgagaattaaggttgccagttcaatatctttctcataatggttcagaacgtaagaaagtgcagtcaaaatttcaggcgaaatttctagtggctcgccttgttggaaacgcacaacattacgacgcaattcttgcgcaaataacatttgagccgcatcccaacggataaattgattatctgcaaatttaagcaagcctaataactgctccgttttataatcataatccagttttactggcgcagaaaaatcacatagcaatgcgggaactgggcgaccataaatgccgttaaactcgaagacttggtctttttcagtaacattcaatacatcactcaacaattcgccattatgttgtaacatttgtttcgtaccgttcgcatcataaagtgccacttttaatggaatatgtaaattcactttttccatttgatctgcggttggcggtgtggattgtgaaaccattaaacgataagtatgcgttttttcgtcataagcatcactaatcaataattctggtgtacccgattggctataccaacggcggaattgatttaaatcgaggttatttgcccgttccatcgcagaaacaaaatcttcacaggttgccgctttgccatcattttcagcaatataaagttgcatccctttttggaagccttgctcccctaataaagtgtgcaacatacgaatcacttctgcccctttttcatatactgtcaccgtgtaaaagttattcatttcaatcactttttcagggcgaattgggtgcgacattgggcttgcatcttcggcaaattgcacggtgcgtaaaaatttcacattattaatgcgattcaccgcacgagaacctgtatctgaagaaaattcttgatcacggaaaaccgttaaaccttctttcaaacttagttgaaaccaatctcggcaggttacacggtttcccgtccagttatggaaatattcgtgtgcaatcacactttcaatggcaagataatcttcatctgttgccgtttgtggatttgccaacacaaatttagagttaaagatatttaatcctttattttccattgcgcccatattgaagaaatcgacggcaacgatcatataaatatctaggtcatattctaaattaaagcgatcttcatcccatttcatcgcttttttcagactttccattgcccaagttgcacggttaagattaccgcgatccacataaagctctaaagccacttcacgaccacttttagtaataaatttatcttgtaataaatcaaaatctcccgccactaaagcaaataaatagcttggttttgggaaaggatcattccattccacccaatggcgaccatcttctaattcgccacttgcaatgcgattaccattcgacagtaagaatggatatttggttttatctgccgtaattttggttgtataacgcgccagcacatcaggacgatcaagcatataagtgatttgacggaaaccttccgcctcacattgcgtacaaataccttcgccagactgatatagcccttgtaatgacgtattttcggctggcacaaggaacgtcacaatttcaagctcaaattcatccgcacttttgtcttttaaatcgagcgttaaactctcgccatcttgttgataatcagaaaatggctcgccattaaatttaatagaagaaaactggaagctatgcccgtctaaacataaagaagtcgcttcattatttaagcgttggaattttgtgattgcggttaccacagtatgtttaggatcaagttgaaaatctaaataaatatctgtgaccgtaaaatctggttgtttgtaatcttttctatattttgctttggctaacataatttgacctattcttataaaagttatgcctaggataaaattttatccttaaagttgcaatggtattttcctacaaaaaccatttagcaaacgtttgctcaatatatgtaatctatgctattctacgccacgtttttaattagttgtagggtaataccattgcaacttnnnnncattccattcattaattaattaatgaatgaatgnnnnngtctccgctaatctcgtagggtgggcgtaagcccacgcgttaaagtgcaatgccttgtgttgtaaggttttctcgtctttcccacgtaagctaaagccaacctacggcaaaattaattcaaaataaaatatgaaatttttcaaaaagaactttaattatatatatatatatataatggaagcgttttttactttttttggaaaaacaaatcttgctgtttattaaggctttagcattttaataaacggtttatattaatcttttgccttatttataaggcacaaacctctttatggagcaatttattatgaaaaaaacacttcttggtagcttaattttattggcatttgcgggaaatgtgcaggcggatattaatactgaaacatctggtaaagttactttttttggtaaggttgttgagaatacttgtaaagtgaaaacagagcataaaaatctgagtgtagtattaaatgatgtgggtaaaaatagcttatctactaaagtaaataccgcaatgccaacgccatttacgattacattacaaaattgtgacccaactacggcaaatggtactgcaaataaagctaataaagttgggctatatttctattcttggaaaaatgtagataaagaaaataactttacgttgaaaaatgaacaaactacggcagattacgcaactaatgttaatattcaacttatggaaagtaatggtacaaaggcgatttcagtagtgggtaaagaaacggaagattttatgcatacgaataataatggagtagcattaaaccaaacccacccaaataatgctcatatttcaggaagtacacaattaaccactggtactaatgaacttcctctccactttatcgcccaatattacgcaacaaataaagcaactgctggcaaagtacaatcctcagttgatttccaaattgcttacgaataattcctaatgtaatgcaagagaaactaagcccacgtgtttattatatcccgcgtgggcttacgcccaccctacaacactataaaaagatagcaaacgtttgctcgatatatgtaatctatgctattctacgccacgttttaattaaaaaattgagaaaaatagcatgtcaaaaactgcacaaattgccgttgtgatggggtcaaaaagtgattgggctactatgcaagaggctactcagattttagatgaattaaacgtgccttatcatgtggaagtcgtctcggctcatcgtacgcctgataaactttttgaatttgccgaaaatgcacaaaaaaatggttacaaagtaattattgctggtgcaggtggtgcggcacatttacccggtatgatcgcagcgaaaacacttgtgccagtcttgggtgtgccagtaaaaagttctatgttaagtggcgtagatagcctttattcaattgtgcaaatgccaaaaggaatcccagtcggaacattagcgattggtccagcaggcgcggcaaatgctggattgttagccgcacaaattctagcaggttgggatgcagaattgctttcacgcttgcaatctttccgtgaaagccaaactcgtgctgtactggacaatcctgatccacgcacataaaaaatatcttcagatctgaccgcacttttaaagtgcggttgtttttttcgtaaatttaacgagaaatattatgcaaaactccaccttatacccaacggtttatgttctcggcaacggacaactcggcagaatgttaggttacgctggcgcacctttagatatttatgttgaacccttagccttcaatgcgccagtttttgacttacctgaaaatgcgatcatcactgcggaaattgaacgctgggaaaaaacgcctttgactgaattactcggcaatcataaaaacttcgttaatcaacatgtatttggattattagccgatcgttttactcaaaaatccttacttgatgaactcaatctttctacctctccttggtgtttattaaaagataaaacgcaatggaatgatgttttccaaactgttggcgagaaagtcgtcgttaaacgcagaacaggcggatatgatgggcatggtcaatggattatcagcgatgaaaacaaagcggacatcaccgatgacttattcggtgaagtgatcgcagaaaaatttattcctttcgattatgaagtttctattgtaggtacgagatttaaaaatggcgaaaagcgtttttatcccgttacacataacctgcaacaaaacggtattttgcgttacagtgtggttgatagtgcgtttcctcaacaatccgcacaacaaaaacaagcggaagccatgctcagcaaaattatggataaattaggctatgtgggtgtcatggcaatggaatgttttgttgtaggcgaaaaattgctgattaacgaacttgcgcctcgtgtacataacagtgggcattggacacaactaggctgtgctatcagtcaatttgaattacatttacgtacgctactcgatttgccaacgcctgaattacaaacgttcgccccaagtgtgatgattaatttaatcggcaccaatcataaccctaaatggcttaatacaccctttgcacagcttcattggtacggtaaagaagtgagaactgggcgtaaagttgggcatatcaatctttcccatcctaacaaagcggtcattattcaacaattagaaaaactccgcactgaattaccagaagattatcaatcaggattaaattgggcgattgaaaaactaaaataatgtaaaaaatgaccgcactttttgatgaatatttaaaaatattaaagtgcggttaatttttataaaaatctttcttgataaaataaaatgactgaagtataaaactatccatcacacaacacatacataaggaaaagctatgtttgaacatattaaagcggcaccagccgatccaatcttaggcttaggcgaagcatttaaatccgaaactcgcgaaaataaaatcaatttgggtattggggtttataaagatgcacaaggcacaaccccgattatgcgtgcggtaaaagaagccgaaaaacgcttatttgataaggaaaaaacgaaaaattatctgactatcgatggtattgcggattataacgaacaaacaaaagcgttacttttcggtaaagattctgaagtaattaaatctaatcgtgcaagaacagtacaaagtttaggcggaacaggtgcattacgtatcgcagcagaatttattaaacgtcaaaccaaagcacaaaatgtttggatcagcacaccaacttggccaaaccacaatgcgattttcaatgcagtcggtatgaccattcgtgaatatcgttattatgatgctgaacgcaaagcccttgattgggaacacttattagaagatttaagccaagcaagcgaaggcgatgtagtgctgttacacggctgctgccacaacccaacgggtattgacccaacccctgaacaatggcaagaattagccgcactttcagctaaaaatggttggttgccactctttgactttgcttatcaaggtttagccaacggattagatgaagatgcttatggcttacgtgcttttgcggcaaaccacaaagaattattagtggcgagttcattctcgaaaaactttggtttatacaatgaacgtgttggtgcatttacccttgtggctgaaaatgcagaaattgcatcaaccgcattaacccaagtaaaatcaattattcgcaccctatactctaacccagcgtctcacggtggggcgaccgtagcaaccgtattaaatgatgctcaacttcgccaagaatgggaaaatgaattaactgaaatgcgtgaacgcatcaaaaaaatgcgtcatttattcgttcagttattaaaagaatatggtgcagaacaagatttcagctttatcattgaacaaaacggtatgttctctttcagtggattaacaggggaacaagtggatcgtttaaaaaatgaatttgccatttacgctgttcgttctggtcgtatcaatgtggctggtatcactgaagacaatattcgctatctatgtgaaagtatagtgaaagtactttaattagagttagaaatcatctctaacctaaaatagagcaaatataaatagttaaagccttgattatcaaggctttaattttatctaatcattaacaaattcttggcaatggttcatttgttggtaaatctaacaatcgactttgcctaatgaatatgaaatcataaactgataatttctgtggctaattcgttaataaatccatgatgatgggatgaaatcaaaatgggtagggaaagttctcgcaaaagtgcggtcaatttttcagtattttttcgatctaatccattggtgggttcatctaataataagatttttggctgcatcgctaagacacccgcaagtgcagtgaaatttttttccccaccagatagggtatgcaccatacgatcttttaaacctgtgataccaagacgttctaattgctgctctgcgatatgatacgcctgctctcttggaatattttggtttaatggcccgaaggcaatatcatccaacaccgttgggccaaaaagttgatcatcggcattttgaaaacaaataccaatcgtgccacgaaatggcgcaaaatctttttctttacgacaaactttgccaaatagtttaatttcccccttggttactggaacaaatcccaacaaagcaagcagtaaagtggtttttcctgagccaatttccccttggacgaaaagacgtttttgaccttccaaggtaaaacttaaatcttgaataatcgctctaccattgcgttctatataaagattatttacagctaacatattatttttctctctttttgccgaactgaaaaccacgacattttaacgccatttgcgccgtttcggcttttaatagggcatgaatcaataataaagcgacactttgagcggtcacataaagggttcggcgattaagcccacgacgaaatccacgagagtgcatggcaatatccattttttgacgcaattctccaagcagtgcaatgtaacgtacggtcagcacaaaaagttgaattaatttttctggcaaaggcaatttaccaatggcttgaacaagcaccgcatcattaatattccataaaaaaagccaaagagaaattaacaataaatgagtacgcaaactcaatttttctgctaattctatgccttgaaaattgagttcaatgccattttcgccaatttgccaacttaatgtcgcccacattaaagcaataaaaatgattaaagcaaaccaacgtttaaggtaaggcaaaaaagatttttgactgagctgcagtgaaataaaaaagagagaaactgcaagcgcattaagggggataagccaagtgagatcactcaatccactgatgattagcccccagataaataggtaaatcaacctaaagtgcggttgaaataagcgatgaattttcattaagagacattctcggtacgattcatgacttcaggatacattttaccaagcaaggtaatcactcctacgctgataatactatccaaaataaataccggaatatgagagactagcaagagccaaacaagattcagataactttttccaccatctaacatcagcacaaaagaagcaagtgcaccagccccgccaacgccaattacgccagctccaataccgacgaataagcgatcttttaaagccatgtgaggttgtaaacgagaacggaaaagataatgagcaatcactgcaggcgttgccatcacgcatagattgacgcctaacactgcaaatccgccaaaagaaaagaagatgacttgcaataaaagtgcgataagaaacgcaggaaaaacagcccacccaaggaataaaccagccataccatttaaaattaaatgcacactaccaattcctacgggtatatgaatagttccagccacaaaaaatgcagcggcaaaaagtgcggtgagcgataaacgttctgattctaaacgacgtaaccccacagcaatgcccgcaacagcaagcactgcaccagctaataaaataggcgtatgtaacacgccttcagataaatgcattaaatacgtccttgtttaattttatgcgcattacgtaaagcaataagtccagcaataccaacgatataaccgattccacctaaaatatcatgcaaataaattttatcttttaaatgcgcaatatcttcacgaagcagcattaaatctgcaccgctttgattttcggcagatgtatgagcagcaacaacggacgcacggtgtccttcatcgccttccaccacaacttttaaggttgtatgtggcacatcagcaatagaaagcttaaatgcgccttggcgatctgtttttccagttaaaacaggatcagaaacgcctgagcggaaaacttctaaataagtttcagctgcaggagtcatatcagaataataggatttgccagagagtgtttgcccatcatattgggcaaacacataaagcgcgtgggcataagcattcgggagataacaagccgcaaaaagtgcgataaaaaaaacaattttcttcatcccaaatccatattattgtgcgtcaaaagttagcatatattctacagagcgacgatcgtaatctgcattatttgttacgttttcctcaaactctgcccagactttgttgaaacctttagttggcgtaaattgagcgatacctttttcattagttaaattgaacggtgcatcttcacttacacctactttaatcccttgaacgggtttaccgttatgtaacacaaggatagaaagtggtttgttcgcttgtgctttttcttgaggaatcaattcgtaagcttgttgatgagatttgaaagattcagcatcccatttcaaaatcgctttaccaaatttaacaggattggtactaaattcagcagttggttcttcacgttttgttttttcaacgtatttaccgcttggtagttttgaccatacaccattatcgaaatgaacgaatactaaatcagatttaggcataagataggcttcgccatttctgaattggtaatcaacggcagttaattttccttgcgcatttaaggcttggatagatttaagtttagattctggataggtttcagtttgttcatgtccaaatttcactacgtattcatcttgtgatgaagtaggttcaagccaaacattgtgagcgttagcaacagacacacctaaaagtgcggttaatcccacggcgattttttttaattccattttggatgctccttgtttgtttaagaaaatctaggcgtatgataaaatatgaagtaactttagaatcaagtcattttttaaggaaattgatgaaaattggagcgcttgctaaagccctaggctgtaccgtagaaaccattcgttattatgaacaacagggtttaatcccgcccccaaaacgcacttcaggcaattttcgccaatataatgaagaacatttgcaacgtttatcatttatttgtaactgccgaaatttagatatttcattaaatgaaataaaaagcctactgaatttagaaaacgcctccaaacaacaagcagaagaaataaatcgtgtattagacaaacacattaaagaggtggcgacaaggattcacgaactcgcccatttacggatgaaattaattgaattacgtgagaaagcagtctcgaatgatgaagatccaatgaaattgctattgcaacatagtggcgtgaaatttgtgcgattaaaataaccgcacttttagattatggctggctagataaacgctgttttgcttcctgattacctaattcagcagcttttttcaaccattctaaggattttttaggctggttttgtgagagataaatattacttaacatcatcatcgcatccgtatctttagctcgagctgtacgttcaaaaagcttaatggcctgctctgtattttgtttgacgtaatcgccacgcagatacataacgccaagattatttagccctttcacgctgcccttctctgccgcttcgctaaaccaccaataagccttttcatagtctctcaccgtgccacgcccaaggttatataacatacctaaattgctttgagccgttatatttccttctaacgccattggatacataatattgaaaacgtcgatccattgttgtttattggcaaactcttgtgccaaattcattcttgcttgatcatccattttcggactcgctgtaacatcaacggttttcattgcccaaataggcaaactaaaacaaagtaatactatatgaaaaaataacttcagtttcatttacaaggttgctactaaaagtaaaataaaaaacacggcagtaatcgcaaattcgattagtccaacttgcataacagaaagctttttagtgggcaaataaacggctcgcactaatccaggcacaaaagctaatgctaaaataaattgttgcgaaaccacaaaaatcagcgcacataataagtgaaaaatcactgatgcccaaaaataacgtggattttttcgttcacgcatcattgattttacataaagtgttgttccaataaaaaataatgttggataaatcgccacccaaagtattttttcatcaaaagtgcggtcagaaaagtaataggatcccattccagctagagcaaaaattaagatccctgccaagtcattccataaattgcgctcatcttttttcttggtgaaataaatattcaccgcaacaaacggtaacatggcaaacataaaatacaacacttgccaattataaattaacgcgggaatcgcaaaaatcacggcggcagcaaaataaatcacagaccattttttatataactcaagatttttacctttaaacaaattcaaaaaaggataagtcatcaaataaagcgaaaaccatcctaataataaaaataagtgtgcccatactggattagcaagcaacataccataaataaaaggcaccaatgccataacaatagcaccgtgctgattagaaataagcagtttcataataattaaataattgagaataattgtcgggtattttagcctagtaaagaggattttacaaagcagtaaaggctatttagaatagaagaaaacaccccaaaggagaatcctatgacaattcaacgcattttacccagtgcacgtttaagtgaagtttcaattcataacaacctcgcctattttgcagggcaagttccagaattaactatcgagcaaaatgcctacgaacaaaccaaagaagtattaggtttaattgataaattgttagcagaaattggctccaataaaagcaacattttaaccgcgcaaattttcttagctgatatgaaagattatgcacaattaaatcaagcttggggtgaatgggtcgatcatgttagcccaccaagtcgagcgacagtggaagctaaattagcggatcctcgttggaaagttgaaattgttattattgcaacttgttagttttttaagccgaataaacaggagaatattatggaaaatttgaccaatgaaatttgggtagcaattggtatcgcttttattgttggattatttattggttacattattgtgcgtttaaccaaaggctccgtaaaacatcaagctaaaacagaagctgaattaaaaacagttaaaacccaacttgatacacaaaaggcgcaaatcgaaaaacatttcgcagaaagtgctgagttattcaaaaccttaattaacgattatcaaaaactttatcgccactacgcaacctcttccaataacttactgggcgaaaaagatcaaaaaggtttatttacccaacagttaattactacaacagataaatctcaaaatgaacagcctagagattattcggagggtgcatcaggcttatttaaagaaaataaagaagaaaattaaaaagtgcggctaaaaatagaaatatttttagccgtttattattctattattgcgttgattttttagattttttccatttccaaaaaaagaatagtacaagtaacccaataaatatataaatcacaatttgacctttttgaatttgtgtatgtagccaatctaaatttttagcccccaattccccaagataaatccaaataggtacagaaataatcgcagcacagaaatctattaaaacaaaacgaacataacttacacggcgtgtaatacctgataccatataaattggagcacgtaaaccgggtaaaaatcgtgcaacaaacagtactcgattgccatattgactgaatttttcacgcaccattcttaaacgctgtaatgttacgattctacgtattggtcggaaacgtaaaattttcgtgccataaattcgaccaagccaatacatacaggaatcgccagcaagcacaccaatcatactaaccagcaacatcaaatgagaattgacattttctggataaagcccagcaatgacaccacctgaaactaatgttatatcttctggaataggtacaccaaatccacaaataattaaaacaaaaagaacagcccaataaccatattcagtaaaaaatccaattaaaaattccatttgttcctgcttttttattatattaatagatgtgataaaaaattggttcacattttaatcttttcaaatcaaaaagcctagaaaaaagtttgatttgaaaataaggatattctataatccacgactctcaaggcttgtctttgagcggtttttaggaaaattgctgggtcgcctgcgattttctttcttttaacatttaatttcaagagaacattaaaatggcatttaaatttaacgctgaagttcgtacagcgcaaggtaagggtgcgagccgccgcctgcgtcacaatggtcaaattcctgcaatcgtttatggtggcagcgaagagccagtttcaatcatcttaaaccacgatgaattaaacaacgcgcaagcacatgaatctttctattctgaagtgatcactttagtagtagatggtaaagaagttgcagttaaagtacaagcaatgcaacgtcacccattcaaaccaaaattggttcacattgacttcaaacgtgcataattctagttcacgcatttaaataaaataacaaaaaagctaagacatttatcttagcttttttcttacatattcattctttctcaataaatatctaaactttaatttttgatcaaataacgatttttgcaagttattacgaagatattgaaaatatggctggggtactaggattcgaacctaggaatgctgagatcaaaacccagtgccttaccgcttggcgataccccaattagataaatctttgattggatataaagaagacttttttgatagtatggctggggtactaggattcgaacctaggaatgctgagatcaaaacccagtgccttaccgcttggcgataccccaacgactatttgacttacaaagcgataaatggtgcgggacgagggacttgaacccacacacctctcggcgccagaacctaaatctggtgcgtctaccaatttcgccagtcccgcaaatttggtggctacagcgagattcgaacttgcgaccccaacattatgagtgttgtgctctaaccaactgagctatgtagccatcacttaatttgcttaaccatatcggctttgcggggcgtattatgctaattttgatgatcctcgtcaaatacttttttacaaaaaaagtaattttatgtttgtttggttattaatgaagcatatcacttattttttattcatttaaacaacttatatggctttctcaacagccaaatttttcctaatcctattttttcttttatgcgttcatttattgttaattaaaatttatttgacaaaaaatgcctaaatcgttatttctatacccactattctaaaaaaaacacaacatctaggagtatcttatgccccagctctcagccgccaaatttggcggaacatctgttactaactacgattcgatgacagcttgtgcaaaaattgtcattgccgatcccaatacacgcgtagttgtgctttctgcatcagctggtgtaacaaatttattagtagctttagcaaatggtgtaaaagcgacagaacgtgaaaaattaattggtaatgatctgcatattacttcaggtgtggcaaaacgtatttttgatactgttcaatcttataatgtgcgaatgattagttatggggcaagtaccaacaatgtttgtatgttagtacaaagtgaacattctgatgaaattgtacgctcgttacacaaatccttatttgaataaaatttaaacctaaagtgcggtgaaaaatcaccacactttttcttttatatcattgagattaaagccgaaaaagagtaaagtaaacggctgttcatttaactaatttaaccgaataaaaggcggaaattatgggaaaaagcgttgttatcttaggcgcacaatggggcgatgaaggtaaaggaaaaatcgttgatcttttgacggatcgcgtaaaatacgtagttcgttatcaaggcggtcataacgcaggtcacacacttattatcaatggtgaaaaaaccgtattacgtttaattccatctggtatgttacatccaaacgtaacttgcttaattggtaatggcgttgtggtttcgcctgaagcattaatgaaagaaatgggcgaacttgaaagccgaggtattaaagttcgtgaacgtttattaatttcagaagcttgtcctttgattctgccttatcacgttgcaatggatcacgcacgcgaagcagcccttggcaaaaaagctatcggtacgactggtcgtggtattggcccagcttatgaagataaagtagctcgtcgtggtttacgcgtaggcgatttatttaataaagaagcctttgccgaaaaactcaaaaacatccttgaatactataatttccaattggtgaactactacaaagttgaacctgtcgattatcaaaaaaccttagatgatgtaatggcaattgccgatgtaatcacaagtatggtggcagatatcactacaattcttgatactgcgcgcaaaaatggcgaacatattttatttgaaggcgcacaagggacaatgttagatatcgaccacggtacttatccgtatgtaaccagctcaaacacaacggctggtggtgttgcaacaggttctggttttggcccgcgtaatcttgattatgtacttggtatcattaaggcttactgtactcgtgtaggtggtggcccattcacaactgaattatttgatgatgtgggtgctgaaattgctcgtaaaggtaacgaatttggcgcggtaacaggtcgtccacgtcgttgcggttggtttgatgccgtcgccattcgccgtgcaatccaacttaactctatttctggtttctgtatgactaaactagacgtattagatggttttgatgaagtaaaaatctgtgttgcttacaaaatgccaaatggcgaaatcgttgaatatgcaccgttagcggcgaaagattgggatggtgtagaaccaatttatgaaacattacctggctggaaagaaaatactttccgcgtcacagatgtaaataaattgccacaaaactgtattaactatattaaacgtattgaagaagtgactggcgtacctattgatattctttcaactggccctgatcgtgtagaaaccatgattttacgtgatccgttcgcagcttaattgctttaaatttctgaccgcacttttaaaagtgcggtctttttttattattttttactattcttcgatagaacgtaataattcgttaatgcctactttacctaaagtttttgcatccacttttttcacgatcacggcgcagtataagctgtattttccacattttgatggaaggctacctgataccaccacagaacctgctggtacacggccgtaatgaatttcgcctgtttcacgatcataaattttggttgattgaccaatgaatacgcccattgaaataacacaaccatcttcaacgataacaccctcaaccacttctgaacgagcgccaataaaacagttatcgccaataatagttgggttagcttgtaatggttctaacacgccgccgattcctacaccacccgataaatgcacgtttttaccaatttgtgcgcatgaaccaaccgtcgcccaagtatctaccatggtgccttcgccaacgtaagcaccaatgtttacataagatggcattaatacgcagtttttagaaatgtatgcacctttacgcaccgttgcagaaggcacaacacggaaactttcttcagcaaaacgttcttcggtataatccgcaaattttaatgccactttgtcgtaatattttgtttctgcaccatcaatgatttggttatcgttaatgcggaaagatagcaataccgctttttttaaccattgatgtgttacccattcgccatcaattttttcggctacacgatattttccagaatctaatccttcgatcacttcttcaattgccgcgcgcgtttctgcatcaacggtttttggtgtaatttctgcacgtttttcaaatgccgcttcaataattgcttgtaaatttgacatagaacttcctatatacgttgtgaataaaacggcattagttttaccatattttaaacgggcaagcaaaacaccgaaaaaaatcaccgcactttgtagaaacaaaactgcggtgataataaaaagttgatttgattaaaagattgaaagtgcaagccccacgacaacagacatactaaaaacaaccataatcattgcataaccaaaatcgctcattttgttctcctcataaaaaataacgcagacattctagcaagaataatacgaaaaaatcacttctttttataaaaaatttgcaataaagatgactaaattctcaacaaacctttataataggaaaaattttttagggatttaaatatatggcaacaattaaagatgtggcaaaaatggctggtgtgtccaccacaaccgtatctcacgtaattaataaaacccgtttcgttgcaaaagatacggaagaagcggtgttatccgcaattaaacaacttaattattcccctagtgctgtggcacgcagtttaaaagtcaataccaccaaatccattggtatgattgtgacaaccagtgaagcaccgtattttgccgaaatcattcattctgttgaagaacattgctatcgacaaggttattctttatttttgtgtaacacacaaaatgatcctgaaaaagtcaaaaatcatttagaaatgttagcaaaaaaacgggttgatggcttgcttgtaatgtgttctgaatatacgcaagattcattggatttactttcatcattttccactattccaatggttgtaatggattggggcccaaatgctaataccgatgtgattgatgatcatagttttgatggcggatatttagcaaccaaacacctcattgagtgcggtcataaaaaaatcgggattatctgcggcgaactcaataaaactaccgcaagaacgcgttatgaaggctttgtaaaagcaatggaagaagctaaattaaccatcaatccgtcttgggtactagaaggtgcatttgagcctgaagatggttatgaatgtatgaatcgtttactgactcaagaggaattaccaactgccctattctgttgtaacgatgtgatggcgttaggtgcaatttccgctctgacagaaaaagacttacgcgtgccagaggatatgtccattatcggctatgatgatattcacgcctcacgtttctacgcaccaccattaaccaccattcatcaatcaaaactacgtttaggcagacaggcagtaaatattctgttagaacgaattagtcacaaagatgaaagcgttcaacaatatggtcgtattgatatagcccctgagcttatcattcgaaaatccgttaaatcgattttataaacttagcaaaaataaaccgcactttttaaataattcttaaaaagtgcggtttatttttagctattttttagtttttcttgattattttcaaaatttctctgaatagcatttgccctccaccctatttttagttatatctatcgccaacttacgaattttattttttacttttaggagttcctatgacacaagagtacagtactcttcgtaataacattagtatgttagggcgttttctcggagaaacaatcaacgatgcccaaggtaccgatattctcgagttaatcgaaaacattcgtaaactttctcgcaattctcgtgctggcgatgataaagcaagacaagcattgctcgatacgctaggtagtatttctaatgaaaatattattcctgttgcacgtgctttcagccaatttttaaacctcacaaacattgctgaacaatatcaaacaatttcccgtgaacattctcttgctcaaagttcttctcaatccttaagcgaacttttcaaacgtttaaaagaacaaaatgcctctgtggaagatgttcataaaaccgtcgaaaaattattaattgagcttgttctgaccgcacatccaacagaaacaacacgtcgttcattaattcataaacacattgaaatcaataaatgtttaagcaaattagagcataatgatttaacggaaaaagaacgcaatattattgagcgtctattacttcgtttaattgcagaggcgtggcataccaacgaaattcgtactgttcgtccaacaccatttgatgaagtaaaatggggctttgcgatgttggaaaacagtttgtggcaagctgtaccagaatttttacgccaactaaatgaaaccgcccgtgaatttttaggttacgatttgccagtgggattaaaacccgtacgcatttcctcttggatgggcggcgaccgtgatggaaacccatttgttacggcacaaatcacaaagaaagtactttattttgcccgttggaaagcggcggatttattcttacaagacatcagcaaattagccgatgaactttcaatgatgagatgtagcgatgaatttcgtgttaaatacggtaaccatttagaaccctatcgtttcgtagtaaaaaatttacgcgatcagcttacagcaacattagcttattttgatgatcacttatcaaatcgcacaccgcgcgtatctgaaagcgaaattattttagaagataatcaactttgggaaccgctttacgattgttatcaatctttaattcaatgcggtatgcgcattattgcaaatggttcattgttggatattttgcaccgtattagttgttttggcgtgacactttctcaaatggatattcgccaagaaagcactcgtcacaccgatgccattgctgaaatcacgcgctatattggtttgggcgattactctcaatggacggaagacgataaacaggctttcttaattcgggaattaagctcacgccgtccattaattccgcaaaactggacgccatcgcctgaaacccaagaaattttagatacttgcaaagtcattgctcaacaaaaacaaggtgttatagcttgttatgttatttcgatggcgcgcagtgcatctgatgttttagccgttcatttactcttaaaagaagctggcgtgccatatcatattcctgttgtgccattattcgaaaccttagaggatttagatgcagccgaaaaagtgatgactcaacttttcaatgtgggttggtatcgtggcgtgatcaataatcgtcaaatggtaatgattggctattcagattcggcaaaagatgcgggaatgatggcagcctcttgggcgcaataccgtgcgcaagaagccttagtgaatttaacagaaaaacttggcattgaacttactttattccacggacgtggtggcacaattggtcgtggcggtgcgccagcacatgcggcattactttctcagccacctcgttccttaaaaaatggtttacgtgtaacagaacaaggcgaaatgattcgtttcaaactgggtttacccgcagtagcagtagaaacctttgatctttacgccagcgccattttagaagcaaatcttttaccgccaccagaaccaaaaccagaatggcgtactataatggacgagctttccacgatttcttgcgatatttatcgtggtgtggtgcgtggcgataaagattttgtgccttatttccgcagtgcgacgccagaacaggagctctccaaattgccgcttggctctcgccctgcaaaacgcaatccaaatggcggcgtggaaagtttacgtgcgatcccgtggatttttgcttggatgcaaaaccgtttaatgctgccagcttggctaggcgctggtgcagctattcgtcaagttattgaacaaggcaaaggcgatattattcataaaatgtgcgaaaactggccgttcttttcaacgcgaatcggaatgttggaaatggtctttagtaaatcggatacttggctttcccaacaatatgatcaacgattagtgaaaaaagagctttggtatttaggcgaaaatttacgtaagcaacttgaagatgatattcaaactgtgctttcactttctcaccaaagtaaattgatgtctgatttaccttggattgcagattcaattgcattacgtaatatctacacggatcccctcaatctactgcaagtggaattgctccaccgtttccgtgaaaatccagagcaagtcaatcccgatgtggaacaagcattgatgattaccatcacaggtatcgcggctgggatgcgcaatacgggctagaaagatgaaaaaagtgcggaaaattttccgcacttttttattcaaatcgatcacttaataaaaattgtaaaaccgcatccattctcaaatgaggaatgctctccccttgttctaaaggctgaggttcaaaactatcgaaatcaaagtgcggttgtttttgccaaaattctgctcttggtaatttacttggcaccgttcctggataaagcgtaatcggttgtttatcaatagaacgaatcccttgaattgctttcatttcttttccttgctgattcacgatcacttgttttgtggtacgaacagccgcaatggcggtatattccgtatcaattccttcaaattctacatggcgaccgccctcttgcacaatttggcgcattaaactcattaaattaggaatttgatcacgagtaatatgatccgccttggtcgcaacaaacattaatcgatcaatttgcggagaaaacaaacgatgaagaaaatttctgctgccataatggaaattattaaataactgatttaagcccatttgcatatctaaaaaggcttgctgactgtgatttaaaggcgttaaacaatccgccaaaataacttgacgatcaaaggtagaaaaataattttcgtaaaaacctttcacaattttattgcgataataattataacgttttgtcagcacggcaaaatagctattcgatttggctgtttttttcaaggtttgccaatgttcttccgaaagatgaattaatggaaaaaattgtaatgcgggcgcaccctctaaatcacttggcaatacaaatcgcccaggctgaataaattgcatgccttgcgacttacattggtgtaaataatccgtataacttttcgcaatcttggctaaaacatcttcatttgcgaccgcacttaaatccaaattctgcaacatggaaagccaattttgcgccaattcttcacgaatgcctgttgttaccttaatttgctcttgtgaccattgttgaaaatctagatttaataacggcaaatcgagcagccattctcccggataatcaaaaatatccagataaagcgtgccgcgttctttcaaatggcgtagcaagccagattgacgttgaaaacgaattgctaaacgcgtttcactcacgccacgagtagattgaaaccattgaggcggattttgtgacaaatcatttaaattactttcataatcaaaacgtggcacgctgagatcttgttgggatactcgtttgactgccaagatcgcaccatttctagctgcttcaaacaagggcaaattctgtgatgaatgttgattaatggagagaagttgattgattaaacttgtaataaacgccgtttttccactccgacttaaccccgtcaccgccaagcgcaaagtgcggtcaaaaccacgattaataatttgattgatttccttttgaacccgattaaacattcaatatcctagccatttttactaatatgccttacaatttgacacataatttatcacaatgcatttgttatgttacgtctaaatctgagatttttatcttttctgctctgtataatccaaagtgtagaattacaggctgcgccaagtgttccaacatttttaactgaaaatggcttaacttattgcacccacgcttcaggtttttcatttaatccgcaaacagcagatgcaggaaccagtatgaatgtggtcacggaacaaatttataacaaattatttgatataaaaaatcacagtgcaacattaacaccaatgctggcacaatcttattccatttcagctgatggtaaaaaaattttattaaatttacgtcacggcgtaaaatttcaccaaaccccttggtttaccccaacacgtgattttaacgctgaagacgtagtattttcgattaatcgtgtattaggacataatacttatttaccaaccttagcagagacgaatgttacctatagtaatccacaatatagagtgtttcacgaacaagcaagaaaagtgcgttttccttattttgatagcattaaacttaacgaaaaaatcaaatctgtgaccgcactttcgccttatcaagtaaaaattgaattatttgagccagattcctccattttgtcgcatcttgccagccagtatgccattattttttcacaagaatatgcctatcaattaagcgcagatgacaaccttactcaattagatacccacccagtaggcacagggccttatcaagtaaaagattatgtatataaccaatatgttcgcttagtgcgtaacgaaaactattggaaaaaagaagcaaaaattcaaaatattatcgtggatttatctactgatagaaacgggcgactcgtcaaatttttcaataatgaatgtcaaatagcctcttatcctgaagtgagccaaattggcttattaaagagcaacgataagcactactatatgcaatccactgacggaatgaatttggcatatcttgccttcaattttgaaaagccattgatgcaggatcgcaccattcgagaagctatctcacaaagtttgaaccgcgcacgtattattcacaacatctatcacaatactgcgacagtggcgaataacattattcctgaagtatcttgggcttcaagtgtcaatacgccagaatttgagtttgattacaatcccaaaatcgccaaaaataaattagcagataaaaaccttttgttaaatttatgggtaattaatgaagaacaagtctataatcctgcaccttttaaaatggctgaaatgataaaatgggatttagctcaagcgggtgtgaaagttaaagtgcgtgccgtaactcgtccatttttaactgcgcaattacgcaatcaatcggaaaattatgatttgattctatctggttggttagctggtaatcttgatcctgatggttttatgcgtccaattttaagctgtggaacaaaaaatgaactcactaatttatctaattggtgtaatgaagaatttgatcaatttatggatcgtgccattaccacctcacatttaagttcacgcgcaaaatcctataatgaagcccaagaactcgttttacgtgaattacccattattcctattgccaatgtaaaacgaattttagtcgcaaatagtcgtgtgaaaggagtaaaaatgacaccttttggtagcttagatttttccaccttgtattttattcaggagaaacactaatgttatggtcggttcttcgccatattctgtgggtggcattattattactcgtattatcgctattaggctttgtcattttattgcgcgatcctcttaatgcgaatcttgttacacaaaacatttatatcggctatttccattatttaggcaccttgttacaaggtgattttggcattacctataacggtggaaaatcattaatgaaccttattcttacggttcttcctcccacattggaactttgtttcattacattgtttttggcatttatttttggtttgccacttggcattataagtgcggtcaattctgaacaagtttttgcaaaaagtttacagagcttatcttatgtagggctatctattccaatattttggttagcccctattttactgtatgttgccgcgctctcacattgggaaattgccgctattggacaatataatttgctttacgaaattaaatccattacgggatttcctgttattgatatgtggtttatggaagtaccttatcgtacaaaaatcgtacaaaacatattgcaacatttagccttaccaacattggtattgtgtattttgccaacaatggaaattatccgcattattcatcaacgagcagaatatattttgaatcaaaatttttctaaagtagcgacaacacggggttggtcaaaatggaaaattctccatcaatacgtattccgtaatacttttcccctgcttgttccacaagtaccacgtgtattcacattagtattaacgcaatgtatgttggtagaaacggctttaggttggcctggcattggtcgttggttaattaatgccgtaaatgaacaagattacaacagcattgccgcaggtgtaattgttattggtgtatgtattattttgattgatacattcactaaaatattcacttttatactcgatccatttaaaaagaaaggttggtatgcaaaataaagaacctgatgaattccgcgaaagcacctcaatctttcaaatttggttacgctttcgtcaaaataccatcgcactttttagcttttatttattaatcgcattaatttttaccgcactttttgctagttatcttgcaccttatgctgataatcgacaatttattgggcaagaattaatgcctccttcttgggtagatagaggaaaaattgcttttttctttggtactgatgatttaggtcgcgacatattaagtcgtttaattatgggtactcgttataccttaggttctgctttactggttgtcttttcagtggcaataataggcggcgcactaggaattattgcaggactactgaaaggtattaaagctcgttttgtcgggcatatttttgatgcttttttatcgttacctattctattaattgccattgttatttcaacattaatggaaccaagtttatggaatgcaatgttcgcaacactcttagcgatattgccgtatttcatccatgcaatttatcaagccattcaacaagaattgaaaaaagattatgtgctgatgttaaaacttgaaggcatttctaactgggaattattaaaaagcactattttaccgaatattactattatttatattcaagaagtggctcgtgcttttgttatagccgtgttggatattagcgccttgagttttatttcccttggcgcacaacgaccaaccccagaatggggcgcaatgattcgagattctttagaactactctatcttgcaccttggacagtacttttacccggtttcgctattatttttactattttattaagtattattttcagtaatggcttaactaaagccatcaatcaacatcaagaatagcctatggcacttttagacatttgtaacctcaatattgaaattcaaacctccaatggacgtataaaaattgtagatggcgtcaatctttcccttaacgaaggggaaatcagtggattagttggcgaatcaggctcaggaaaaagcttaatcgctaaagtcatttgtaatgcaatcaaagaaaattggattattactgccgatcgctttcgttttcacgatgtcgaattacttaaactcagtcctaataaacgccgaaagttagtgggtaaagaaatatccatgattttccaaaatcccttatcttgccttgatccaagtcgaaaaatagggaaacaactcatccaaaatattcctaattggacatttaaaaataaatggtggaaatggtttgggtggaaaaaaagacgtgctattgaattgttacatcgcgtaggaattaaagatcatcgtgatattatggcaagctatcctaacgaactgacagaaggcgaaggacaaaaagttatgatcgcaatggctgtcgctaatcagccacgtttattaatcgcagatgaaccaacaaatacattagaatcaaccactgccctacaagtttttcgtttactttccagtatgaaccaaaatcagggaacaacaattttacttacgagtaacgatattaaaagtattagtgaatggtgcgatcaaatttcagtgctttattgtgggcaaaataccgaatctgccccgactgaaatattaatcgaaagtccccatcatccttatacccaagccttaattaatgcagtacccgattttactcaacctttggggtttaaaactaaattgggtacgttagaaggcaccgcgcctattttagagcaaatgccaattggctgtcgtcttggcccaagatgcccttttgcacaaaaaaaatgtatggaaaaaccaagacgattgaaaataaaacaacacgaattttcttgtcattatcctattaatttacgagaaaaaaatttcaaagaaaaaacaaccgccaccccttttatacttaattgcaaaggaaatgaataatgcccttattacaagtggaagatttaactaaaacttttaaaggtcacgccagtttatttggtcgaaatcaattcaatgcagtggataaagtgagttttacccttgaacgtaaacaaacacttgcaatcattggcaataatggctctggtaaatcaaccctagtgaaaatgatagcaggtattattccgccaacttctggtcgaattttatttaatgatcgagaattacaatatcaggatgcccaatctagagctaaacatattcgtatggttttccaagatgccaactctgcatttaatccacgtttaaatattggacaaatattagacgaaccattaagcctagcgacagattggacagaaacacaacgtaatgaaaaaatctttgagaccctctctcttgttgggctttatcctgattacacaaatctcaatattaagcatctttctattagccaaaaacagcgtgtcgctttggcacgtgcgctgattttagaacctgaaataattattatagatgatgcaattggcaatttagatgcttctgtacgtattcaattgcttaatttaacccttgatttacaacaacgtttaggtatatcttatatttatgtgggacaggatctcggtgtaattaaacatattgcagatacgattatcgtaatggatgaaggaaaaatgattgaatatggcagccctcaaaatctttttactgatccacaaactgatgttactcgtcgcttagtcgaaagctattttggcaaaattttagatgaaaccgcttgggtaaaagacaaaaacactcactaaggaaaggaaaaatgaacactcgtcccttttatttcggacttatatttattgcgattatcgctatacttgctaactatttaggaaacactgatttttcccatcattatcatatcagtgctttaattattgccatcttgctgggaatggcaatcggcaataccatttatccgcaattttcaacacgagtggaaaaaggcgttttgtttgccaaaggcacgcttcttcgcactggcattgtgctgtatggtttccgcctcacttttggcgatattgccgatgtaggattaaatgctgttgtcactgatgcgattatgctaatttcaaccttcttttttaccgcacttttaggcattcgttatctaaaaatggataaacaattggtttatctcactggggctggatgtagtatttgtggtgcggcagcggttatggcggcagagcctgttaccaaagcagaatctcataaagtttcagtggcgattgccgtagtggtcattttcgggacgcttgctatttttacttaccccttgttctacacgtggtcacaagatttaattaacgcccatcaattcggtatttatgttggttctagtgtacacgaagtggctcaagtgtatgcgattggggaaaatattgatcctatcgtggcaaatactgccgtcatttccaaaatgatccgagtgatgatgctcgccccatttttattaatgctttcttggttattaacacgtagtgatggggtatcagaaaatacgtcacacaaaattacaattccttggtttgctgtactttttattggtgttgcgatttttaattcttttgatttattaccaaaagaactcgtaaacttattagttgaaatcgattctttcttattaatttcatcaatggctgcccttggcttaactacgcaagcaagtgcaatcaagaaagcaggactaaaaccgcttgttttaggcgtattgatttatttatggctagtgattgggggatttttagtgaactatggaatatcaaaattaatataaaattcacttaacattgaccgcacttttaaagtgcggtctttttttatgaagaatattttcagatatggttatttaaaagatgaaattaggctttatttcaaaggacgatttaataaaccatcctctaaaaataaagggccaattgggcgtttaggaatatcaaacttttgtggataaatcacatccaccaaatacaatccatcgggttttgctgttggtgcggcaagctgacgatttttctgctcaagtagccattgcatccattcaatcggctgatttccagcaccgacctcaatcaaacttcccacaatattgcgcaccatatgatgcacaaaagcgttcgcctgaatatcaacaataatatattttccgatacgagacacattcaaatgatgcacattacgccaaggcgtatgagactgacattgcgccgcacggaaagaggaaaaatcctgttcgccaagtaaacattgccctgcctgatgcattttttccgcatctaaatctaaatggcaatgggttattcctcccgctaaaatcgcagagcgtaatttattacaataaagaatataacggtaacggcgtgctgttgcagaaaatctcgcatggaattcatcatcgacttgttttgcccaactcactgcaatgtcatcaggtaaatgagcattcgtaccaaaagcccaagccttctctggacgaaccgcattggtttcaaaatgaacaacctgacccgttccacttacgccagaatccgttcttccagcacaaaatatgtcaattttttcatttgcaatgtgagaaagtgccttttctaattcttcttgtacactgcggactttttcttgtctctgccaaccataataattttgcccgttatactcaatgcctaatgcaattttcattttttaccttttggcttaataaagtgcggttatggtagcccaagtttatttggagcgcaaattcacaaaatcactccagaattaattaacaaataagtgatagcttctaaaaattacaacaattaatgtgaattttttgtgataaagatcccattctgataatctgccattagagtttacactccaaactccctataattaatcaatgtattatgaaaaactaaaaggaaaattatgaaaacattaagtgaatttatcgttgaacgccaagctgaatatccaaacgcaaagggggaattgagtggtattttgtcgtcaattcgtcttttagcgaaaattattcatcgagatattaacaaagcaggtttaacaaatattctcggtcaatctggtattgaaaatgtacaaggcgaaagtcaaatgaaactcgatttattcgcccataacacgatgaaagcggcattaatggcacgtgaagaagtggctggttttgcctctgaagaagaagaaagttttatcgcatttgatacagaacgtggccgtaatgcaaaatatattattttaacggatccccttgatggttcttcaaatattgatgtaaacgtatccgtcggtacaattttctctatttaccgtcgcgtatctccaattggctcacctgttaccttagaagattttatgcaaccaggtaataaacaagtcgcggcgggttatattgtttatggttcatcaacaatgttggtatataccactggtaatggagttaatggtttcacttatgatccatcaatcggtacattctgtctttcccacgaaaatatgcaaatgccaaaagagggcaaaatttattccatcaatgaaggacaatacctgaaattcccgcaaggtgtaaaaaaatacattaaatattgccaagaagaagataaagtgactcatcgcccttacgtatctcgctatattggttcacttgtagcagacttccaccgcaatttattaaaaggcggcatttatatttacccaagtgcaaccaactatccaaatggaaaactccgtttattatatgaaggcaatcctattgcatttttagcggagcaagctggtggtgtcgcaacagatggttatcgtcgaattttagatatcgaaccaaccgcacttcatgaacgtgttccactatttgttggttcagaagatatggtaaaaaaagcgcaagaaatgatggaagaatttaaagaataataaaaatctcctcgattaaaaggggagatttttatcaataaaaagcatagcccaacttttcagccaacgcataacaaagcgtccctttcccagcaccactaggaccatcaacagtaataatcattcccatacaaattatcctttcattctcaaaattttgcgcattatagagacaattgcccctcattaccatcctagagattattactagcttttttgtatggcttatctaataaagttaatttcacaagctctaggaaagcgtaaactccctttcaagctttttcttaaatttcagaaaatctaaccacatagaaaaaggtttttaaaaacatttcaaggtttttttaataactattgtggcacttaaggacgaaattctttcagctaaagtagctcttttttctattattaaattggacaatccttctgacgttctacacttcgtttatacaaaaaactgaaattaagcacgctagacattatgccttttaatatatacgcattttttcaaacttgttctaaagacttttctacattacaataaaaacgtagctatcaatacaaataatcaaataatcaaataatcaaataatcaaataatgaggacaaagaaatggctgaaaatcgttatgaactaaataaaaacttagcacagatgctcaaaggtggtgttatcatggatgttcaaaaccctgaacaagctcgcattgcagaagctgctggtgcagctgcagtgatggctttggaacgaattcctgcagatattcgtgctgttggaggtgtctctcgaatgagcgatcctaagatgatcaaggaaatccaaggagcagttagcattccagttatggcaaaagttagaattggacatttcgttgaggctcagattttggaagctattgaaattgactatatcgatgagagtgaagtgctttctccagctgacaaccgtttccatgtggacaagaaagaattccaagtaccttttgtatgtggtgccaaggatttgggcgaggccttgcgtcgtatcgctgaaggggcttcaatgattcgtacaaaaggagaaccaggaacaggagatatcgtccaagctgttcgccatatgcgcatgatgagtcaagaaattcgtcgcattcaaaatttacgtgaggacgagctctatgttgcggccaaagatttacaagttcctgtagaattggttcaatacgtccataagcatgggaaattgccagttgtcaacttcgcagctggaggaattgcaactccagcagatgcggccttgatgatgcaacttggcgcagagggtgtctttgttggttcaggtatttttaagtcaggagatcctataaaacgtgcgagtgctattgtcaaagctgtaactaactatcgaaatccacaaatcctagcacaaatctccgaagatttaggtgaagccatggttggtatcaatgaaaatgaaatccaaattctcatggctgagcgaggaaaataaatgaaaatcggaatattagctctacaaggtgcctttgcggaacatgcacaaatgctagaaaaattaggaattgaaagtgtcgaactgagaaatttaaaaaattttcaacaacattacagtgatttatcaggtttgattctacctggcggtgagtcaaccgccataggaaaacttttaagagagctgtatatgctggaaccgataaaacaagctatctcttctggctttcctgtctttggaacttgtgctggtttgattctgttggctaaagagattacttctcagaaagagagtcattttggaacaatggacattgtggttgagaggaatgcctatggacgccaattgggaagtttctatacagaagcagattgcaaaggggttggtaaaattcctatgacttttatcagaggacctatcatcagtagtgttggtaaaaaagtcaatattcttgcaacggtaaataataaaatcgttgcagcccaagaaaagaatatgctggtaacatcatttcatcctgaattaacaaataacttgagtttgcataagtactttatcgatatatgtaaagtagcataaaccattatctgcatatctgccctccctaggaaacaaaccatattgtagcaatgagagcagataattttcatcaaaaaaccgaacagttactagacttaaaaccgaatacaaggtaggataaggatgaaaaaaacaaaatttcttgttgtattgacgagagcaaacgccacttcgtaattgggctttccccaaaacgaaccaaaatcaacaatcctaaagacattacacaccattgagtatttacaaggtttcaatgcggactgaatcatctagaaagcaccgacggcttggatcttacgattgccaaaatattatatcaagcagcctttttcgtgctcattgccaatccacgacaaatcaatcactttacaatgtcacatttagtaaccaacaattactgtacaagtgtagactggaataagtcaaataattttgcggtaaacatcagataatttgctgaccttattttgatgagttggctctatctaagaagaggaaataataaacaagcggtcacatttgacatcttgtttgcattttagaggtttattccgcccagtattttttcctcgtcgttttaccaatacctggattaaagctattggttggatccaactctttatagaattttctcaaggttggtttagcctcgtataaatgccctacattgtgttcggctgggtattgcgcaccacgcttgtcaagtaatttcaacatttcgtattctagttcttcataatcataacctttttttacaatgtaatcttggtgaaagacatgacacataaaatgtccgtagtaaagtttagagataattctgttatcaatttctggcggtaacacttcaaaccaatcttgatcattgcgacgtaatgcaacatctaaagcaactatttcttctacttctttttcgtgaattgcacgataacgaattgcagcacttgcaacagcgaaacgatgaagcattgctgcttgggtttcgattgcattacattcaaaatagccaccttttgagccatctgcaatgtaggattccaaatattcacgggcttcttgaatgccttttccacccattttgataattaagtgatgctcgtatttgttgcgataatcccataagctttgtggaagatgttctgggatgaatttagacacagtttgcataagtttatcgcttaaatgttgtggtaaaaagaagaattttttgccgatgcgatccacgtttgattttaaggaaaagagttttggtagccaatgtgtaccaaactttttaatgacccaaaaggtatctttgccatattttgctgcgatgtcaaatgcatcacgatggatatattcacctgaaatgggtagcacttcgaagtttactaacatgtggcgacgaatatcgctcaacacagaagtttgattggtgccgatatagaaaacagccgtctctttttcaagcggaaaggtgtctaaacgaaccgcaaagacagcaagttttcctgcacagcctgaggcttcatagtggcgagctgggtcagcattaaaacgagcaggggagccttcatcaacttgacgaacatagttgcagtagtaatggtcgtgaccatgtccgcaatcttgtcgaatatctttaacctgataacgtttttcttgtagattagttaaaatttcttcaggagtttctcctaaatcaatgcctaaatgattttttagttctaattcacctttttcattaagttgagcgtaaagtgccatttctgtataggctggtccacgttgaactaatgctccacctgagttgttacaaatcccaccaataactgatgcaccaatgcaagatgagccaataacagagtggggttcacgaccaaacggtttaagttgattttctaattcattgagtgtagagcctggtaagcaaataacttgggaagcgttattgatgagttggattccgtcaattcgcattgtattgatgacgacaatatcgcgatcataatcattgccatctggtgtagagccaccagttaaacctgtattcgccgcttggtttataacaataacatcatgttcaacgcaaacttttacaatgttccaaaactcaagtagagtggcagggcgaacaacagctagggcgtttcctgttccaaatcgataaccacttcgataagcttctgttttagttggatcagtaataatataacgagatccaacaatatcggtcagtcgtgaaatgggttgttgaacagacattttattatcctcttgtaataagaattaatagcactataacagaataattcccatttggataaggatattttaggctttaatcggtgttttttttggaattgctctgcatataaagaaaattctctctttatgataggttcagtgccgtatgggtatttcaatcattcaatatcagcaatgcaaaatccgttgaaacctttaaagataaagaaaaatattatttaacaaacgaaacttttactgaaatacaacctattgatatgccaaacgaacgtaatattcaaaattatcactcgacttacaacaacattcgggattggcttggttatcaaaaagctggcgaggaaaaagcaaagtcgaccatcaattaggaattgggatgaggtagtttttgaagtgaattttaagcacaataaaaaaacatcagaatttttagccgcactttctaaagtatccgctaatttacataaatgatttaaccctacctatgctgctactcttttaattttatgaacagtattttctgtttctttcatattatcttttgataattgagtaagataattaggcatggtttgtttgaataaagataaattttttaaaattttggatttaccatgcgtttcaatcaatgctaaatcaaactgttctgaaagcttattatcattcatttctagaatagattctctttcatccacaaaaaatttctgcaggcaatggtgtaaatccttcattgaaatgagtttacgtaatatgccatccattccaatttcttaatgttcctactcgctttacataacattgacggtaaaaaatcataaataccattctaatagttttctcgcaaatgttgggcgatttctataatttcacaaatatttttacataaatttgggatttatttaacaatgaaattatggcttataatttagtgctaagtccgaactttgagtaaattaaccaaatgatgaaacaagccgtagcaaggcttgatgaagcaaaaccgattttacattccgaccaaggttggcaatatcagatgatagattatcaacacatactcagggagaatggcattcaaagtatgtgaagggaaattgtttagataacagtagaatggaaagcttctttagatgttttaataactggaaaaaagctccatgagcgtattcagaagaggctaaagactgagccctgtgaatgacagaactcagtccttgagctaaataagtctaactttttggggtcagatcatttatcaataaactgatcaaaaaaaccgaacttaatgttcggttttctttttcattacataatacgacgcgattgagtgtaggttctagcccaatatttttcatcaagggaacttattgtcacaccttgccccgtacttgcatgcataaattggttattaccaatataaacaccaacgtgattatttttacggaagaaaactaaatcgccttttttaagttctgatttattaatttttctacctaaatgacgctgttcagccgtagaacgaggcaattcaataccaaaaacttcagaaaaagtagtttgcataaatgctgaacaatcaataccacgtttagtcgtaccgcccatacgatagcgagtgccaacccattcattataaacactggctagagccttatcgcccatcaaagcagaggaacggtttgttctcactttgtgaaaaatgcctgttcgattatctttttctaaattattaattaaaccagttaattgaatatcatcattttctgaaataacctgatgacttaccgttcgtggtgcattagaacaagcggttgctaatacagctaaaccaataataactaaaattcttttcaacataatttcaaataattaaaagaaataaaatttcgcagtggctatcaaaatttgaataaaattgccagtaaaaatccaattctaatggaatttttgtgatcttttacacaatgacttaatttgttccaccaacagtaatttcatcaatttttagtgctggctgtcctacgccaacaggtacactttgtccctctttaccacaaaccccgatacctaaatcaagctctgatttatctgcaaccatagaaattttttgcatcacttcaatgccactgccaattaaagttgcgcccttaactggtttcgtgatttttcctttttcaattaaataagcttctgaagtagaaaatacaaatttaccagaggtaatatccacttgccctccaccaaagtgcggtgcataaatcccctgttttacagaagcaatcaaatcatcaaactgactttgtccagcaagcatataggtgttagtcattcgaggcattggtaaatgggcataagactcacgtcgtccatttcccgtaggtgctacgcccatcaaacgggcattcattttatcttgcatgtaaccttgcaaaatcccgtctttgatgagtacattgcactggcttggcacaccttcatcatcaatagttagtgaacctcgacgattttcaatcgtgccatcatccacaatcgtacataacggtgaagtcacttgctcaccaatcttgcctgtaaaaagtgaactttctttacggttaaaatcgccttctaaaccgtgacctaccgcttcgtgtagcaacacgcccggccaacccgcacctaacacaacaggcatcaatcctgcgggtgctgcaactgcactaaggtttactaatgcttgacgaaccgcttctttagcaaaaagtaccgctctaatatcgccatcaacaacttcaaagaaccaatctaaaccgaaacgcccaccagaaccacaacttcctcgttcacgttttccattttcctctactaacacagaaatagataagcgaactaaagggcgaatatctgcggctaatgtgccatccgtcgccataattaatacttcttcataaacggaactgaggcttgctgaaaccttggttacacgatgatcttctgcgcgtgctgtacgatcaaccaaatgtaatagctcaatttttttctctttagtcaaactttccaaaggattaatcgccgcataacgagcaataggatttacaacattaaaagcggatggcgaaatcaaattcccctgtttgacttgcgcgattccctttaccgcctccgcacattgctgcaaagaagcaagattaatttgatccgcataagcaaaccccgttttctcgccagaaacagcccgcacaccaacgccacgatcaatatgaaaaccgccttcttttataatgccgtcttctaatacccaactttcatcttggctaagttgaaaatacagatcggcataatcaatattgcgatgcgacataatgtcaaaaatattgagtaatgtttgagttgaaagattacttggtgtgagtaatgtatttgaaacttggtttaacatattttttccagtctaaagtaaatatcttgtgagtgcttgtatccgtttaatacaacagcacagattaaaatcggattaataaagtgcggttgattttgaggttatttttccaaatgcgctaatccaaattgatacaaagcattcttcttataaccatacaactcagcaactatagctgctgcttttttaagtggcaattcttctgcaattaactcaagtgcctttaccgcttgcggcgaaatttcatcgttattgtcagactttggtttgccttccacaatcaaaaccatctcgccttttgtacgattgggatcttctaaaagccattcgcgtaaatttttaatcgtattccccgtaatcgtttcccaagttttagtcatttcacgggctaacacaatatagcgtccttcccctagcaccgcttgcatatcttctagtgtatctaaaatacggtgagtggattcataaaaaatcaaagtgcggtcttcttctgcgatattttctaatttatctttgcgtgctttacttttcgcaggtaaaaagccttcaaaacaaaatctatcagaagcaatccccgatgcacaaagagcggtaattgccgcacaagctcctggcaaaggcacaactcgaataccagcttcacggcattggcgtactaaatgaaaaccagggtcactgattaatggcgtccccgcatcagaaatcaaagcaatattactcccctgcttgagcttttccaccaaaatatgcgctttttcttgttcgttatgatcgtgcaaagcaaaaaatgacttcttaatgccgtaatggctcaataaaagtccactatggcgagtatcttctgctgcaattaaatccacttgagcaaaagtctctaaagcacgctgggtaatatcctgtaaattgccaatcggtgtggcaacaatgtataaaattccggttaaatcagtcatttttgtttgcttttaagttatgagataagtaagatttgctacaactattgtctgtttatgatggagcaaagatgtctattctattacaaggcgaacgttttaaaaaacgtttaatgccaattttattgtcaatggctttagctggctgttcaaatctacttggtagcaatttcacgcaaaccttacaaaaagatgcaaatgcaagttctgaattttatataaacaaattagggcaaacacaagaacttgaagatcaacaaacctataaattgctcgcggctcgagtattaatccgtgaaaacaaggttgaacaatcggcagcgttattgagggaattaggcgaattaaatgatgcacaaaaattagatcgtgcattaattgaagcgagaatttctgctgcaaaaaatgccaatgaagtcgcgcaaaatcaattacgtgcattggatttaaataaactaagcccgtcacaaaaatctcgttattacgaaaccttagctattgttgccgaaaaccgtaaagacatgattgaagcggtaaaagcgcggatagaaatggataagaatttaacagatgtacaacgtcgtcaagataatattgataaaacttgggctttattgcgttcagcgaatactggcgttattaataatgcctctgatgaaggtaatgcagctttaggcggttggctaacattaatcaaagcctacaacgattatattcgtcagcctgtacaattaagccaagccttacaaagttggaaaaatgcttatccaaatcatgcagccgcaacgctgttcccaaaagaattgcttacattgcttaatttccaacaaacgaatgtgtcacaaattggtttactcttgccattaagtggagatggacaaattcttggtacaaccattcaatcgggtttcaacgacgcgaaaggtaactcaaccattcctgtgcaagtgtttgatacctcaatgaattctgtccaagatatcattgcgcaagcaaaacaagcggggattaaaaccttagttggtccattactaaaacaaaatcttgatgtgattttagcggatcctgctcaaattcaaggtatggatgtacttgcattaaatgccacaccaaattctcgtgcgattcctcaactttgttattacggactttcgccagaagatgaagctgaatctgccgccaataaaatgtggaacgatggcgtgcgtaatccacttgtcgcaatgccgcaaaatgatttaggacaacgcgtaggcaatgcctttaatgtacgttggcagcaattagcaggtactgatgcgaatatccgttactacaatttgcctgcggatgtgacctatttcgttcaagaaaataactcaaatacaaccgcactttatgccgtagcaagtccaactgaactggcagaaatgaaaggttatttaacaaatatcgtacctaatttagcgatttatgccagttctcgagcaagcgcaagtgcgacaaacactaataccgacttcatcgcacagatgaacggtgtacagtttagtgatattccattttttaaagataccaattctccacaatatcagaagttagcaaaatccacggggggcgaatatcaattgatgcgtttatatgcaatgggtgcggatgcgtggttgctcattaatcaatttaatgaattacgccaagtgccaggctatcgcttgagtggcttaacagggattttaagtgctgataccaactgtaatgttgaacgcgatatgacttggtatcaatatcaagatggtgcaattgtaccagttgcaaactaatgttttctttaaaacgtcggcaaggggcgagctttgagcatcaagctcgcctttttttagaatcaaaaggcttaacatttattgcggctaatcaaaatttcaaatgtggtgaacttgatctaataatgaatgacaaagaaactatcgtctttgttgaagttcgccaacgaagtcattccgcctatggttctgctatagaaagcgtagattggcgaaaacaacaaaaatggttagatgccgcaaatttatggcttgcaaaacaaaatatgagcttagaagatgctaattgccgctttgatttaatcgcttttggcaaaacacctcaagatattcaatggattcctaattttctcgattaatggctttttataatgttacaaaaagtaaaagatatttatagcgaaagtattcaaattcaaattgcagcatcaagtatgctttctgaaaatattaccaacgccacacaaatggtaatgcaatgtttattaggcggtaataaggttatcgcctgtggcgtgtcgcgttcttatgctaatgcacagtttctcgtctcaaacttacttaatcgatatgatttagttagaccgagcttcccgtctgtgttattgagcttagaaagtgcggtgggttcttcacttgtttttgaacaatcgcctgaagaattgtattgtcatcaatttaatgccattgcaaaatcgggcgacttacttattgcttttgcacctttggggacagaaaaaatcgtactaaatattatttctcatgctgtcagcaaagaagttaatgttattgtgctaactggctctaacaacgatgccattcaaggaattttagcagataaggatctagaaatatcaatcccagccaccaaagaaagtcgtatcttagagaaccatctttttgtgattaatgcactttgtgaattggttgatcagactttattcccaagtgcttgacaggaaaataaatcactttcaaactaatagtaatttaatctaaaaaggagttaattatgacattatccccgttaaaaaaactcgctatcctgcttggggcgactatttttctacaaggctgtgttgcagctgtgattggaggtggcgctgtagcagctaaagtagctaccgatccccgaacgacagggacacaaattgatgatgaaaccctcgaatttaaagtagaaaatgctgtagaaaaagatgcccaaattaaggctgaaggccgtgtaaatgcagtgtcttacaatggccgagtacttttaataggtcaagttcctaatagtgatgtaaaagacactgccacagctcttgcaaaaggagttgaaggtgtcaatgaagtttataatgaactaactgttagcccaaaaatctcttttgcacaaatcagtaaagatagttggctcacaacgcaagtcaaatctaagatgttcgttgatggtcgagttaaagccacagatgtcaaagtgattagtgaaaatggagaagtatttttactgggtaacgtcacacaatctcaagccaatgcggcagccgacattgccagcaaaatcagcggcgtgaaaaaagtaattaaagtattcaaatacctagactaatccttcaaagtgcggtgaaaaattcaacaaatttttaccgcactttttcttatttttctaaataaaaaattttaatttttattctcataaaaaccatttatttttaaataagttatctattgtcaagaatcaaatcaaaaaatttattacttgcgatcttttctcaaacacattatcttgtgcatcgttttcataaaaacactatatcttgtgttttaaatcctgttttaaataacaacaagaaggctaatacaatgaataaaagtttaatggttacaaagcgtgacggtacgcaagaacaaatcaatcttgataaaatccatcgtgtgattacgtgggctgctgaaggactagacaatgtttctgtttctcaagtagaacttcgttcacatattcaattttatgaaggcattcgcacttcagacatccacgaaaccattattaaagcagccgcagatttaatcagcaaagattcgccagattatcaatatttagctgctcgtttagcgattttccatttacgtaaaaaagcctatggtcatttcgatccccctcgtttatacgatcacgtcaaaaaactagtacgtataggaaaatatgatcaagcgttattagatgattatactcgtgaagaatgggacacaatggacggcttcatcgatcattggcgtgatatgacgttttcttatgctgcagtgaagcaattggagggtaaatatttagtacaaaaccgtgtgacgggagaaatctacgagtctgcacaattcttatatttgctggtttccgcaagtctattctctaaatatccaaaagaaacacgtttggattatgtaaaacgtttctacgatgcaacatcgactttcaaaatttccttacctacaccaattatggcgggtgtgcgtacaccaactcgtcagttcagctcttgcgtattaattgaatgtgatgacagtttagattcaatcaatgcaacagcatcagctattgtaaaatatgtttcacaacgtgcagggattggtattaatgcaggggctattcgtgcattaggtagcgaaattcgtggtggagaagcattccatacaggttgtattccattctataaatatttccaaactgcggtgaaatcttgctcacaaggtggcgttcgtggcggtgcagcaacactttattacccaatttggcacttagaagcagaaaacttgctcgtattaaaaaataaccgtggtgtagaagacaaccgtgttcgtcatatggattatggcgtccagttaaacaaattaatgtatcaacgtttaattaaaggtggcgagattactttatttagtccatcagatgtacctggactttatgaagcattctttgcggatcaagacaaatttgaagaactttacgtaaaatacgaacaagatccaactatccgtaagcgtactgttaaagcagttgaaatcttttctttattaatgcaagaacgggcatcaacgggtcgaatttacattcaaaacgtggatcactgtaatacccactctccgtttgatccactagttgcaccagttcgtcaatctaacttatgcttagaaattgcattaccaactaaaccgcttcagcacattaacgatgaaaatggggaaattgcactttgtacactttccgcttttaacttaggtaaaattgaaaacttagatgaattagaagaacttgcggatcttgctgttcgttctcttgatgccttattagactatcaagattaccctgttgtggcagcaaaacgtagctcacttgcacgccgttcactcggtattggggtcattaactatgcgtattaccttgcgaaaaatggtgttcgctattctgatggttcagccaacgatttaacacaccgcacttttgaagccattcaatattatttattgaaagcctctatgaacttagcaaaagagcaaggtgcgtgtgaatactttaatgaaaccacttatgcaaaaggcattttaccgattgatacctataagaaagatttagattccttaacacaagagcctctacattatgattgggaaagtttacgtaaagatattcaagaatttggtttacgtaactcaacattaactgccttaatgccatcagaaacatcatcgcagatttccaatgcgactaatggtattgagccaccgcgtggacacgtaagtattaaagcatcaaaagatggtatcttaaaacaagttgtacctgaatatgaaaatttaatggataactatgaattactttgggatattccaagtaatgacggctacttacacttagtcggtattatgcaaaaattcgtggatcaagcgatctctgcaaacacaaactatgatccaaaacgttttgaagacggcaaagtaccaatgaaagtgttgttaaaagatcttttaaccgcttacaaatacggtttaaaaaccctttactatcaaaatacccgcgacggtgccgaagatgttcaagaagatcttgatgacggctgtgctggtggtgcttgcaaaatttaaacgcccctattgtcttccccaacttatggggaagatagcacgacataacgaattaggatacattcctcagtctttgatagtttcccctgataaacagggaaagctaaataaatgataagttctatttaaaaggataaataaaatggcatacaccactttctcacaaaacaaaaacgatcaattaaaagaaccaatgttctttggtcaaaacgttaatgttgcgcgttacgatcaacaaaaatacgaaacttttgaaaagctcattgaaaaacaactttcttttttctggcgtccagaagaagtagatgtatcgcaagaccgtattgattatgctgcgttacctgagcatgaaaaacacattttcatcagtaacttaaaatatcagaccttgttagattccattcaaggccgtagtccgaacgtggcactattgcctttagtgtctattcctgaattagaaacttggattgaaacttggacattctctgaaaccatccactctcgctcttacacacatattattcgtaatattgtgaacgatccttctatcgtatttgatgacatcgtaactaacgaagaaatcatcaaacgcgcacaagatatttcttcttattacgatgatttaatccgtgatagccaactttatggcttatacggcaaaggcacttataccgtagatggcaaagaatgcgtcgtgactttacgtagtttgaaaaaacaactttacctttgcctaatgagcgtgaatgcacttgaagcaattcgtttctacgtttctttcgcttgttcatttgcttttgcagaacgtcgtttaatggaagggaatgcaaaaattattaaatttatcgcacgtgatgaagccttgcatttaacaggtacacagcatattttaaatattatggctgcaggtcaagacgatcctgaaatggcagaaattgcggaagaatgtaaacaagaagcctatgatttatttgttgcagcggcagaacaagaaaaagcttgggctgattatctatttaaagacggttctatgatcggcctcaacagagatattttagttcaatacgtagaatatattactaatatccgtatgcaagctgttggattgccactaccattccaaacacgttcaaatccaattccttggattaacgcttggttagtgtcagataacgtacaggttgcaccacaagaagtagaagtaagctcttatcttgtaggtcaaattgactcaaaagttgatacgaatgattttgacgatttttctctctaattaaaaacacataaaaaactaaccgcactttggaatattctttttaaatatttaaagtgcggttaattttttgttcattttaaaaggctttctaacacagaaagccttttatttcttagatttctaataacaatcttgttggatcttccaataattctttaatcgttaccaagaaaccaacagattcacggccgtcaattaaacgatgatcgtaagataaagcaaggtacatcataggacgaatcacaacttgaccattaagcgcaatcgggcgttctttaatagcgtgcattcctaaaatcgcactttgtggtggattgataattggagtggacataagagaaccgaacacgccaccatttgtaatagtaaaattgccgccagtaagatcttctactgttaatttgccatcacgacctttttcagctaatgctttaatttgtttttcgatctctgccatactgagcttatcgcaatcacgaagcactggtgtgactaatccacgcggtgttgaaactgcaatactaatatcaaaatagttatggtaaacaacatcatccccatcaatagaagcattcacttcaggatagcgtttcaatgcttccacaaccgctttaatataaaaagacataaatcctaaacgtactgaatgttgtttttcaaatttttcgccgtaggttttacgcagagtcattatcggctgcatatccacttcattgaaagtggtaagcatcgccgtactatttttggcttcaagtaaacgttcagcaatacgtttacgcaaacgggtcattggcacacgtttttcagaacgtgcactataagccaccgtactaattgtattttgctcagtggcagcttcttgtttcacttgctgtgcttgtcgttttgcaatttcacgttcaatatcttcacgtgttaaacgaccacccactcccgaaccttgaatttgatctgcttgtaaatcatgttctgctaataaacgacgaattgcagggctctgatccacattatgattatgactattttcaatcgctgcattttgacgatcagaaggtgtgggttcattcgttgcttttaacgtcgctgaactgacatctccttcttgagccgtagaaattttgcctagcaactgtttactcaccactgtttcgccctcagcttgaacaacttcagccagtacaccatcagaaagtgcgggaacttctagcacgactttatccgtttcaatttccacaataacctcatcacgtttcacagtatcgcccagttttttatgccaagtagcaacagttgcatctgcaactgattcaggtaggtctggaacaagaatttcgattgtcattttatttttccttttcttcttttttactatatatcttaattatcttggctcccctatttacagaggaaagcaaagatataaaaacctttattaaattaaccgcactttaaagactcaacgcatcttccactaactgtttttgctgtttagtgtgaagcgacatatagcccacagcaggcgaagcagaagctggacgccctgcatatttgagtttaacggattctggaattgctgattcaaaattatgtttgctgcaataccaagccccttggttaagtggttcttcttggcaccatacataatccgtgacatgcgcataaggctcaagcgctttcttcacatcctcatgcgggaatggataaagctgctcaatgcggataatcgctacatctttctgattatttgcacgacgttgttcaagtaaatcataataaactttacctgaacacattaccacacgttttacatctttaggatcaagctcgtcaatttctccaattaccgtttggaaagttccattaatcaactcgtctaaactggacactgccaatggatgacgtagtaaagattttggggaaatggcaatcaatggacggcgcattttacgtaaagactggcggcgcaacatgtgatacacctgtgctggtgttgatggcacgcaaacttgcatattttgttctgcgcaaagttgcaaataacgttcaagacgtgcggaagaatgttcagggccttgcccctcatagccatgaggcaataacataactaaaccacacattctgccccatttttgttcgccagagctaataaattggtcaataacaatttgtgcaccattagcaaaatcgccaaattgcgcttcccaaatggttaaagtttttggatccgtcgtcgcataaccatattcaaaagcaagaacagattcttcagaaagtaccgaatcccatacttcaaaacgaccttgattagcatgcaaatgtgttaatggtacataccccgtaccatcattttgattatgcacaacggcatgacgatggaaaaaggttccacgccccgcatcttcacctgataaacgaacattaacaccttcatcaagtaaggttgcataagccatggtttcagccataccccagtcgagcaatttttcgccttgatacattgctttacgatcattatagattttttctacgcgaggatgcgcgcgtaaactttctggatattcacatacacgtttagcaagggttaaaaaacgttcctgtgaaaatttgctttcatacggcgcagtccaatcataattgagatattgcaaccaatccatttttgccgtatccatttctcgccattctgatacgacgcgatcgccattatctagcgcatcgcgataatcattcgccatctcggtgacttgttcttcagtcatcacgccttctgaaactaagcgatccgcataaactttacgaggtgtaggatgttttttgatgatgctatacatcattggttgagtggctaatggttcatctgcctcgttatgaccatggcgacgataagaaatcaaatcaataaaaatatctcgtttgaataaattacgatattccaccgccatacgcgcagcaaatgccaccgcttcaggatcatcgccattaacatgaataatcggcgcttgaatcatttttgcaatatcggtgcaatattctgtagagcgcgtgtcattcggattagatgtcgtaaaaccaatttggttattaatcacgatgcgaatagtaccgcccacactgtaaccacgggcatttgacatattcaatgtttcttgaacaaccccctgtcctgccacagctgaatctccgtgaacagtaatagcaagcactttgctatgttccgtatcattcatacgagtttgtcgagatcgaacagaaccaatcacaacagggcttacgatttccaaatgggatggattaaatgccaacgttaagtgaactcgcttatcatctacggcgaaatcagaagaaaaaccttgatgatatttcacatcccccgtacgttcgctggaatgtttacctgcaaattcatcgaataaattttcaggctttttacctaatacattcacaagcatattcaaacgcccacggtgtgccattcccattaccacatcatttaccccttgacgactagaatggcgaataatttctttcatcaatggaataaacgcatcacttccttctaaggaaaagcgtttcgccccagggaatttcgcaccaagataacgttctaaaccgtctgctgccgtaagttcacgaagaaaattgacacgttcttcagatgtaaaaatcggtttatctaacaggctttccattttactctgaagccatattttctgctccatatcttgcacatgcataaactccaagccaattgagccacaatatgtttctttcaacatttgagctaattcgccaagtttaatggtatcgcgtttataaacgtaatgatttatattgaaagtttcgttgagatcttgttcagtaaaaccgtgatggcgataatctaattcagggacggaagatactttccaacgataataattgagaggatcaagattagcctctaaatgaccacgaaaacgataggcattgataaattgtagaactttcactaattttgcaccagcagcaggatctatcactgtcaccgcttcattatgattttctcgcgctaagcgacgaaaataatctcgcactggagtatggggctgttcaagtgcggtggtttttggcaaagaatcaaaggtttttcgccagctttcctccaccgactgtggatcactcaaatagctttcataaagttcttctatataagattgatttgcaccgcctaatgctgtgctggctaaccaatcatcaaacgccttgttttgctgcataattacctctttattatgatatttgaagcaatattttcgctccattttttacgcattatacataggattgcaacggaaataagcctcttatcagaaattgttacaaatttgtgatctagttcaaactctttagatttcaaacaataaaaaaccgcacttcatctcttaaacaaagtgcggttatttttacttgtattaaaatttaggatttaggatttaaaaatggattgctccgcttttcttgcccaatggttgtgtaagatccgtgtccagcgataataataatatcgtcatttaatgggagtaattttgttcgaattgaagaaatcaatgtttcataatccccgcgagggaaatcggtacgaccaattccgccttgaaataatacatcgcctgtaaatgccacttttttctcgtgttcaatgaaaccaatatgcccaggtgtatgccctggtaaatgtaaaatctcgaaattaaagccatctaattttaaaatttcaccttcttgattaaaccaacgatcaggtaaaaaagcgtcaatatttggcaagccaaaacgttgggtttgctcgggtaaactctcaaataaaaatttatctttttcattagaaccccaaatttcaacgccaaaatgttgttttaattgcattgcagcaccaacgtgatctaaatggccatgggtaatcaaaatcactttgagatttaaatccagttcttcaatgcgttgaattaggcgttcggcttcgccacccgggtcaataattgcggcatttttgtcatcatcccaaatcaaagaacaattttgttgaaatgcggtaacagggataatttcgatattcatttttgctccttataatcgataaaactgttgagtattcaaaaggatttgcttttgaacagaatgtaatggcaaagactttaattcagctagtttttgcaatacagccaataattgttcagaaatgcccgcacgttcaaatccctcgtgttgccaagggctatccgtttcaatcatcaagcgatttaagggtaaatgttgtgcgacatattgggttttagggttccataaaatatcaggggttaggcttgcaaaatagggggtagagaaaaatttctgaaaagatttttcatctgtcttaaaccagtgaaagtgagcccgctgaattttgtgtttctgcaataattcaagggcaatttctacatcgttatgtacaatatgcaaatttaacggtaaatcccattttttcgctatcagaataaatcgctccagtaattcaatataaggcacgtaatctaaattcggattttctcgtttagaataatgtggtaaccccacctcgccaatggcagaaattaaggaataatgttcgtcaatccattgaaataattctttttgttcttctaaactaggtaattgctgttcaggatgaaaaccagctgcaatataaagtttctttgggtaagtctgttttaaattcagcagttttttagcactgttgagattagtactcaccgcaagcatacctataatctttgaatgagcaagtgtttgctgaatattctcgtcagagagttggtctaaatgaagatggctgtcaaataacatttcttttccaatgaaaaaccgcacaaaagtgcggttaattttacatttgttttacacgcctttccaagttctcacagggcctgtatctacgtgaatgaaattactggttggataataacccacgccaccatttcgcagactttccgcagaagatttcactttaatcaaaggcacatctgcaatacgaaaatcaatggcttttcctttaatgtgataactatttttcgctacgccacgactttggcgatgacgcattgcattagtagcggctgaacgataaccacaaattacttcaatttcagcattgcgtaagcctaaattagtttggatattataaaatttctggaataaatttggatccattttatgcacttgatttgtccttttatcacgcattaaataatccaatttttttaacatcgcaggcgaaaaaccttttgctaaagaaaactctccacttaatctttcgcccgtattaatgttgcggaaagttaaaatacgaggtttaggtgttgaaaccattgctaatacagaatttggtaaaatagatattcctaacgcaataccgcccagcgataaccattttcgtttattctgatccacataattcattatagctcccttattttattgaagatatttttttacgagatcccaattaatctcagcaagattaatctgacgatcataaccataaatatcaggtaaatttacaatatttccgttttcaatccacgcagtaacataatataaaaaaacaggattatccgagcgtattggcgcagaagtggtttttttacttgctaatactgtattttttcgagtttctgtccaacctgcttcttttaataaaatacttgccaattgatcagatttttcaacacgcacacaaccagaacttaacgctcgatttttacgattaaacaatccgcgatttggcgtatcatgtaaataaattgcatcagaacttggcatattaaatttataattacctaacgcactatcgccagccgcttgtcgaactcgataaggaaatttattaccaatagattcccaatcaatagaagcaggatcaacaacattgccttgattatctaaaattgaataattatgctccgtaatataatttggatcggctttcatttttggcaataaatcttcattaattaagcgaattggcgcattccaaggtggatttacaaccacattacttaatttgctatacattacaggtgtcctgcgcgaatttgtgccaacaattacccgagattctaaaattaaatcgccatcacgataatactgtaatttatagcttggaatattcacaaaaattccattatgaaaatcaggaatcacacgtaaacgctgtgcattcattgccaatttttgagcaatatttgattctttagaagtcggaataaacatcggcaatgattgaactgtttggcgatataaatgattttctcccgctaaactttgtatgaaatcaagaagttgattattttccaccgcacttaaccagcgttgaatatgatcattttcaggctgttgtgcttgatactgagcagatgaatacaaccaattagatgcttgagaacgaacattttgtgtgtaatataagtaatctaacaaaatatcacttaataacacatcataaaccaatccgccttgttgttctaccaatgccaatgtttctagtgaagttgccgacgattttgaaataccgcttgccaccattgccgcataatcacgtaacaattgacgagctgccgcattgtcagtccataacggggcatatttacgaaaagcatataaacgcgcgagtaaaggcttaaattgtaacttatgatcgcctatttcgtgtgttagcgtcatattaagcaatgtttgtttttcttccgttaaacgttgctgatccgcataaatggcttcttcaagctcttttctttctgcgagtgacaaatgggaaagattaatgccgtacaatgatttagattggtcatttttgctcaaacctactaaaacacaacccgacatcatcatagataatgataaggcgaataatgataactttaaggtgcttttaaacactaccatttcctaaacctttattaaaatcaccgcacttgttgcttttctcaaacaaagtgcggtcaaaaccatttagtatttattttttactttccgtttttgcttcggataggccgtttgcttgattaattttctgatctgaattaaaaataacgaaatcagctgccattttttcagcttcttttaagaagaaatctggtgcttcgtaatctttcggcaaatcatcaatatctttcaatgctttcttaccctcacgtttaaaacgttcgttcaaatcttttaaacgtcttgcatcatctttatcattctctgctttacgcattttataattcaatgatagaaattttcgatctcggcgttcatttcgcactttcaattcttcattcaatgcaacaaattcaggatctttagcaatacgagcaagatgtttttcatttagaatatttactgcattatcaatataatcgatatttcctacttccatataactcgctgatgggattttatcccaagcaagcgcattatcttctttatcttccccatattctttcgcatctataatttcaggaaaattaatatcggctgcaacaccttttaattgggttgaaccaccattaacgcgataaaatttttgaatagtatattgcaaaacacccaacggactctgatctaaatcatagataaaatttaacgaacgactctgctgcaccgtacctttaccaaaagtattttgcccgatgataatacctcgacgataatcttgcattgctgcagcaaaaatttctgatgcggaagcactgtaacgattaatcatcacaaataataaccccttatattgttgcgtagcatcatcatcttcatgaacacgaatacgctgataagcatcgcgaacctgcacaacagggccatcggcaataaataaaccacttaacgccaccgcttccgttaatgcaccaccgccattttcacgtaaatcaacaataagagcctcagctttttgattttctaatttaaccagtagttttttgacatcttcggttaatccaatataaaaacttggaatttttattaccgcaatgttttttcctgacactttttcaaaggttagtttagccgcttgatcttcaatacggactttatcacgaaccaaagtaataatacgtgattttccccctttagcaggctcaatttctaagcgaactttagtgccttttttccctttaattttttctaccaaatcttctaaacgccaaccaacaacgtcttcaatatcgcctgttgcttgcccaacaccaatgattttatccccaggatgcagctttttactacgttccgctggcgcaccaggtacaagagatttgatgctaatttcatcatcttctgattgtaaagtagtcccaatgccttccaaagaaagatttatactttcattaaaactttttgctgttcttggggaaagataactggtgtgaggatcaatttcacgcgcaaaagcattcaaataaatttgaacaatatcgtctgcttttgtttgcgttaaacgacgaatggctaaattatagcgttttgtaagctttgctttgatttctgaccattttttatcttttaatttaagattaataatgtcattttttacgcgagcatcccaaagtttattcgcatcagcttcagtttgtggtgcagccgctttttcacgatcaatttcaatttgatcttgaccatttaaatcaggctctttatctaataaagataacgcataagtataacgttcatagcgacgtttcatcattacatcataaatgtcaaacgccgcagaaagatcgccttgattcaactgttcatctaacttagtaccatatttttgacgaagttcgtctatatcagactgcaaaaaagtattgtggttaaaatctaaatttttaatataacgatcaaaaattttctcggaaaaatcatcatctaatttaatcttacgataatgggattgagttaatcttgtcgttgcacgcttagttgccaactggctttcttcacttatcgctggaatactaatgtcacttggttttaatgtaggttgtacagcaaatgcaggaattgcactgctcaaacacaccgataaccacgcataacaaatcacattttttgacattttaaatttcataaccatttccgagtcaatttttatttattaagcaaataaacgatctgcagcaacgttcataatcaaaccgttttcaagttcaacacgtgctgaatcttttaatacttctaccactgttgcttttttagcattatctccagctttaactttcacaacagaaccaacagaaatttgtgaaaaatcaaccgcacttagtgataatttactctcttttttaaggtttttattcgctggtttacgcagatgctttttttgttgtgcttttttagctgcggcttctgctttacgtttttccgcaaaacgtgctttcgcttcagcaagttgctgtgcagcgtgagcaacgtgttctgcatctaatacacccgcaggattaccctgtaaatcaacacgcactgcaccttcacgacagccatataaataacgccaatttgatgtgtattggcgaagagcctgacgcaattgggttttacttacgcgttcatcatcttgtaatgcttcagctaaatcttgaaataaacctatttttaatggttttgcttcaccctctaaaacaaagcaaagaggaaatttttctgctaaataagtaatgatagcttttgcgttggttaatttttgcacttccgtttgcacatctgtaacttgagatgataattgtgtgtcagtcatagttatatccttgaggctattaataaaataaagatttgcctagtttatcgcactttttacaaaattaacaacggatcccgttatgctgaataaatttcacacaaaaataacgccaagacttcacaaatacgttaaaacaacgatagaatggcacgtttttgatttataaagaaagaccacaagcgtgcctaaaacaaagctaacttcgcctccatttaaaattttaaaatgcacagaatgtgatgcttgcattaacgtgccttctattcttcaatcaaatgaacaagccgaatgcccacgttgtcatcatctattagaaagtggtacgaggtggtcattacatcgttgtgcaatgattgcattatctattttgatattaatgcccttttccttgaactaccccttattaagtttacatttattgggtattaaaattgatgcctctatttgggatggcatttggaaaatggcagtgggtggttatgaatacactgcgtttatgatctttatttgtgcagtagtaatgccgattacgtttgcacttttagtgattatgctttggctggctaagatttttcagataaaacctcgtagtgttttactatttcttggttacattaaagcttgggtaatgtttgatgtttatttagtggcactcggagtaaccatatttaaagtacgcgaatatgcaacattagaaattaatatttatttaattccttttatttttaccgcacttttaactacgctgctttttatcaaacttaatctttccgccttatggcaggaattttatcctgaatgcacttcagtttatacaaaacaagctgttgaattatgtcctgcttgccattacacctttacgcaaaaatctatctattacgatcatcaaaaaatttgttgtccccgctgccaatcgcctcttaatacatcggataagctaaaattacaagcaacttgggcaaccttaattgcagggattattatgctttttcctgcaaatttattacctatatctggcatttatttaacaggcgcattatctgaagatactttaatttctggggttatttcatttgttaaatcaggtagttattttgttgcttttgttgtattttttgccagtattttcgtgcctatcagcaaaatttttattatgctttacttacttgcttgcgtgcattttaaatggcaacattctattaaatggcaaatgcgtttattgcatctagtacattttgttggacgctggtctatgcttgatttatttgtattagccttaatgatgtcgcttgtcacacgcggagaaatcattaattttaccgtagggccaggcgcattttattttggtgcagccgtattttgcacgatgctttccacctcacaatttgatagcaaattaatttggaaaatttatgacagagaaaaataattcctcctcaatagaagaaaaatatcaagaaataacggcgaacttacgtaaaacaaaacgcatttcgcctttttggctattgccttttatcgcattatgtatcggggcaattttattcttccaaattgtgaaagaacgtggtactagcattacgattacttttgctaatggttcaggtatcgttgcggataaaactcaaattcgttatcaaggattacaaattggcatagtaaaagaagttcatttcactgataacctgcaaaaagtggaagttgtagccaatatcaatcctgaagcatcaagtattttgcgtgaaaatacaaaattttggcttgtgcaaccaaatgtttctcttgctggcatttcaggattagattctctcgtgtcaggtaattacattactcttcaaccaggtgatggcgatcgtgaagatgaatttatagcagaagaacaaggccctattgcacaagtttccgcaggagatttattgattcacttaatttctgatgatttaggttcgatttctattggtgcatctgtgtattttaaaaaattacctgtaggaaaaatctatgattaccgtattaataaaaacaataaagtagaaatagatgtggtcattgataaagcctatgccaagtttgtgaaaaaagattcacgcttttggaatattagtggcattaacgcgaacattagcccatcaggcttaaacctaaatgtagaaagtttaaatgccgttgtacagggggcggtttcttttgactctccagctgacagcccaaaagcagatgaaaatagtcatttcacgctctataccaatttaaaagcggctaaacgtgggattgaaattaaggtaacaattcctgcctcatccgctcttattgcagggcaaacggaagtttattctcaagataatgctatagggattctcgccaagctaagtgcggtagaaaataacgatgaaattttagaaggcagtttattgatagatccaaaccaagcctctttgtttaaagcgaatagcaaaattgtcctacgcaataaaaaaatagatcttggcaatttagcagaacccaaaaaattctttcgtggcgaatattttgatgtgattgcgggagacggcgaaactaaacatcaatttaacgtgattaaagaaaatgaattattactcaatgcgcctaacacgttagttttaaccctcactgcgccagaaaattatggtgtaagcgaagggcaaaatgtgttttataacaatatgataattgggcaaattgtttcacaaacaatagatgtaaatggcgtacaatttaaagcagcaattgcctctgaataccgcaatttaattcacgaagatacacaatttgtggcagcaaccaattttgatataagcgttggattagatggattgcgttttgaatctgcgacgccagaaaaatggttacaaggcggcgttcgagtcctaacaaaacaagctttgggaaaagctaaaaccagttatccgctttatcaaaatatcagcaatgctgaacatggcatcacaggaaatattcttacgccaacgataaccttacacacccaaaccttaccaagcattgataaaggctctcttgtactatatcgccaatttgaagtgggaaaaattttaagtattaaacctaaaacaaataactttgatgtagacatttatatttatcctgcttatcaacatttattgacagataaaagccgtttttgggtagaaagtgcggcaaaaatagatgtaagtccaaaaggcattagtattcaagcaacgccacttgcacgttccttaaaaggggcgattagctttgataatggcggttcaggcaataatcgaacactttatgcaaatgaaagttatgcaaaatccattgggtttgtaattacattaatcacagatgatgcaactaatcttagcaaaggaatgaatctgcgctatcttggtttagatgtggggcaaattgacagtattcagcttgatgcaaaagcaaaacgcattactgcaaaagccctaataaatccaaattatatgaatataattgcaaaagaaggggctaactttacgataatctcgccacaaatttcggcaggtggaatagataaccttgatagtttattacagccttatattgatattgaaattggtaatggaaacacaaaaacacaatttaatttagcgcaaacggcaccacaacgtaataaatttagcaatggcacgccgtttattttagaaacgcgtgatgcgatgaatttaagtgaaggttcgccaattctttatcgaggtgtagaagttggcacagtgaagaaatttgaacttaatagtcttggtgatcgtgtgttagtgcatattgccattatgccgaaatatagccatcttgttcgacaaaacacagaattttggatcgcatcaggctacgactttagcttaggctggaaaggtgcggtatttaatacgggtagcgttcagcagttgctaaaaggtgggatttctttctccacaccagcagaaaaagaaattcaaccgcaagcgcagcccaacaaacgtttcttgcttcaaataaaccgccctgaagaagtgcaaacttggggaagtggcgcgttatcaaaataacataaatgaaaatatttaatctgcaccttaatgaattagggtgcagataagctattaccatttttctaatgcttctttatcactctctcttgcttcaatccaacgctcgccttgattggtttgttcttttttccaaaatggtgctttagattttaaaaaatccatgatgaattcattggcgtgataagcatctccacgatgtgcggaacttacccccactaaaacaatttcatcgccagtttgtaaaagcccaacacgatgaattaccgatacacgttgaatatcccaacgagctttcgcttgtgcaacaatttcattcaacgctttttcagtcattgcgggataatgttctaaatacaaactagatactgcatcgcctaaattaagatcgcgtactttacccacaaaaataaccgttgcaccaattgaatgttgctcagaaagccattgataaacggcattttgatcaaaaggctgttcttgtaccgcaatttgaatatctgtcatttagccccctgttactggtgggaaaaaggcaatttcatcgccattttttaccgcactttctaaaggcattaaggtttgattaattgccactaaaagtttacctttttccagtgccaatgcccatttatcgcccttttgagtaaggtgttcacgcaccgcttccgcagtggcaaaatcatcttctaattgaatggcatcaatgccaattaattcacgagtttgagcaaaaaataaaacatttaacatcttatttttcctccgcaataaaatggcctgattttccaccgctcttttctaacaagcgaactttctcaatcacaatgtctttctgcacagctttacacatatcgtaaatggttaaggctgctacgcttgccgcagttagtgcttccatttctacgccagtttttccagttaatttgcaaagagattgaatgcgaacttgattgctttcaagtaacggttctaaattcacttctactttagaaagtaataagggatggcaaagcgggataagttcccaagtgcgttttgccgcttgaatacctgcaatacgagcagtagcaaatacatcgcctttgtgatgtttaccttccacgatcatggaaagagtttcttttgacatagttacaatggcttcagcacgagcttcacgaacagtttccgctttagcagaaacatccaccatattggcttcgccttgagaattgatatgtgtaaatgtagtcataatataataaaagtgcggttaaaatattgaatgttttaaataagcgaccaaaggaagcagatgaatattgctattcatctcactttgctttttagccaccaatagacgctaaatgatttcttacaccagtatcgccgatatgcaaataatgatgttcacgtttgccttgaagtgcggcaaaaatacgagcctgtaaaataccttgctgttcgtgcgactgtaataaatcacgtaattcaatgccttcttcgccaaataaacaaagatgaagtttaccttttgctgacactcttaaacgattgcaacttgcgcagaaattcttttcataaggcataattaaaccaatttcgcctgcataatcagaatgcgtaaagactttagcagggccatcagtgtgagatttatgctgtaatgtccaaccatttttcagcaatttatcggctaagatttgtccagaaagatggaatttatcaaagaaactatccatttcgcccgtttgcatcaactcaataaagcgcatttgaattgggcgatctttaacccaagcgagaaattgttcaaattctttatcattcagatttttcatcaaaactgaattaactttgactttgttgtagcccacttcaaatgcacgatcgataccacgcatcacgtcatcaaatttattgatacctgtaatttgatggaacattttgggatcaaggctatcaacactgacgttaatagacgtaatccctgcttgcttccaatcagccacatcttttgccatgcgatagccgtttgtcgtgacggctaattgacgaatgccatcaatattagcaatgctttcagcaatagaaataaaatctttgcgtaaagtcggttcgccacccgttaaacggattttctctgtgcccatttcagcaaaggcttgagcaagatgggtaatttcttttaaggttaagaaactcggtttgttagcttcgggttgataaccatcaggtaaacaataggtacaacgaaaattacactgatcggtaatcgacagtcgtagatagtaatattgacgttggaaaggatcgactaagcgagactctcctacgttcttgataggaatagattgcattttacacctttctaaatacggagaggataaaccgtttccagcgtatccctgaataacgtagcgcgttattggcttgccaccgtatttcttgtgaaacttaggctaaacaagctcggagttatgcgttaaatttgatttgtcgtcattctaaaagatttcacttcataaacacaatcaataatattgatgaaaatcagtattttcctaaattcttaaaaatcaattatataaaaaaatacataatgaatataagactagctcattagtgataattaatcctatttatattaataaccataaatttttagctgattattatgaggtatttttattgatttaaatcataatttaatcaataaataaatttctctacttttcataatcagaaaaatatcctaccatttttatcggatttatttttactaatcaatataggagtgatttatgtcttttgcccaacaaaaacttagcgaactcgctgtttcaattccaggtgcaactaaaatttttcgtgaatatgatttagatttttgctgcggaggttctgtattattagaagtcgcagcacaacaaaagaatcttaaccttgctgaaattgaaaaacgtttaactgatttacaacaaagtaaagcagaaaataatgataaagattggacttcggcatcttatgcggagatgatcgatcacattattactcgttttcataatcgccaccgtgaacaactcccagaattaattacattagcggagaaagtagaaaatgtacatgctgatcgtgatgactgtcctataggcgtaaccgcacaattagaaaaaatttatgctgaacttagccagcatttaatgaaagaagaacaaattttgttcccaatgatcaaaatggggaattatgctatggcctcaatgccaattcgtgtaatggaaatggaacacgatgaagcaggacaagatgtggaagtgatcaaatcccttactaataactgcacgctaccagcagatgcttgtttcagttggaaagccttatatagcggtattaatgaatttattgatgatttaatgcaccatattcatttggaaaataatattttatttccacgtgtattaaacgaaaaataattcatattcatcaaaaaataaccgcactttaatctattccgaaaaacaaactaaagtgcggtcatttttacaagcgttttgagttggtcgataagccgagttctgtcgtggacaatcattcctctaggcgacaaattgctctgccgctcaagcaacctacccgaactctggacgggccacccattgagttcctatttggtcttgctacgagtggagtttaccctgctgcacgttgttaccaacggcacggtgcgctcttaccgcaccctttcacccttaccgtttacacggcggtctgctctctgttgcactggtcgtcggctcacgccgcccggacgttatccggcactctgccctgtgtagctcggactttcctctcgtttacttgtcccactaggtcgtataaatacggttaagggcttcaataaaccagcgattgtctaaccaactcggcacgtagtataggggcaatcactagtgcggtcaataaaatccccaatttttgaatattgcttcatcaatcttatcaacaataatgcctaatttttcattcgtatttttttaggatttcgctaaaataacgccaatttcaaccgctcttttaggaagaagaatgaactatctaaaaattgcacaggattccctttcagtggaaagtaacgcacttttgcaactcagccaacgcttaggcgacgattttaatcaagtcatcgatcttattttagcctgcgaaggacgattagtcatcggcgggatagggaaatctggtttaatcggtaaaaaaatggtggctacctttgcctctacgggtacaccaagtttctttttacatccaacagaagccttccacggcgatttaggtatgttaaaaccaattgatatcgtgatgttaatttcctatagcggcgaaaccgatgatgtcaataaactgattccaagtttaaaaaatttcggtaataaaattattgctgtgacgagtaacaaaaattccacgctcgcacgccatgcagattatgttttagatataactgttgagcgtgaagtgtgtccaaataatctcgcgccaacaacatccgcacttgtcacgctggcacttggtgatgcactcgccgtatcgcttattacagcacgcaatttccaaccagctgactttgctaaattccatccaggtggcagtcttggtcgtcgtttattatgtaaagtgaaagatcaaatgcaaactcgcctaccaaccattttacccaataccaattttacagattgtctgaccgtgatgaatgaagggcgaatgggcgttgccttagtgatggaaaatgagcaacttaaaggtattatcacggatggcgatattcgccgcgcgcttacagccaatggtgcagaaacgctgaataaaacagccaaagactttatgacaagttcaccaaaaactattcatcaagaagaatttttatcaaaagcagaagactttatgaaagcgaaaaaaattcactcgctagtggttgttaatgatgaaaatcatgtggtgggtttagtggaattttcaagctaaggaatcccaatgcaacaaaaattagaaaatattaaatttgtcattactgatgtagatggcgtgctcaccgatggacaacttcattatgatgccaatggtgaagccatcaaaagttttcatgttcgcgatggtttaggcataaaaatgctgatggatgcaggtattcaagtggcagtgctttctggtcgcgactcccctattttacgccgtcgcattgccgatcttggtattaaattatactttcttggcaaacttgaaaaagaaaccgcttgttttgaactcatgaaacaagcaggcgtcactgccgatcagaccgcttatattggcgatgatagcgtagatctccccgcctttgcagcgtgtggaacttcttttactgtggctgatgcccctatttatgtaaagaatactgttgatcatgtactttctactaatggaggaaaaggagcattccgtgaaatgtccgatatgattttacaggcacagggaaaatcttctgtgtttgatagcgcccaaggtttcctgaaatcagtgaaaaatatggagcaatgataactaattcgtcagtgttattgctcaataaaaaataaagtgcggttaattttcaaggtgttttaaaatctctcaaaaatcaaccgcacttttatctttataacgcccccatactctttaacaagactctttcctaaaatactcatagaactgcggtaagagttgggtaatcaaatttaattgctgatacggtaaactaaagacggctcgttcttctgcggtcatctcttgtttttccaattcttttaaatgtgtttcgatactttcttgctgttggttaaaaatagcttcgggtatttcttcaatgtgttctaaggtatagataattttctttgccacgggataaaaaccagataaaaattgtgcggtctgttgcaaatttttcattctgtcgcgataagcgccaagagccgaaatatagcttaatagagaataattcagtttgagcaaatcaaagcctttttgtaaatatgccttatatttcactggctcattattcatattagaaagtgttgtactcagtgcggctgcatattgatgtgcattacgacgtgctatgcgatatttaagatcgtcacttttaccaaattgcaattgactaataatatgcaataaatacaccgcatcactccgcaatgcttgatggctcactttatcaagttgcaaatatttccaatctggccataagtaagatacggcaaaccatgaaatcgcggcaccaagtaaagtatcgagtaaacgaggcattaatgcggctgccgtatcaaatcccatcacatcaaaactcagcaaaacttgtagtgtgatgaaaaaggtagaaaaactgtaattattactgcggaagaaaaagaatagcgtacttgtaagcaccacaagacccagttttaattctaaggttggatttaaataaggtaatagagaccccaccactacgcctaatatcgtgccgataatacgctgacgtaaacggactttagttgcagaatagtttggctgacacacaaatatagtggtcaataaaatccaataacccagattaaattggaaaaactcaacaattgcacaacataaaaataccactatagataagcgtaccgcatgacggaacaacggtgactcaaaagtaaaatggctaaaaatcaccgcacttatattttttaacccagtgatttgttccgtatgaatttgagccaattgttcggtatccgtcgtgtcttgtgctaattggcgaagttgccagttaatactttgtaaattatctaacaaggtttgaatatcaatcagttcatcttgatcattaagatgttgtgttcgatacagttcaaaggaatgcaaggtgcctaaaagggatcgttcgacacgttcattaaaatgataagatttattttcacgcaaactcgccgtgatttctttacaggattgtgcttgtagctctaacaaacgctgaatacggaaaatcaaatctgtattttttagtttttccgttatttgttgataatcaaaatgcgtagaattggtgcgttcgtgaatatcttgcgcagcaaaataataacgtaacattctctgggtacgaggatggcgatgttgccctctaatacggtaaaaaagcgcggtgcgaacaatattaaatgccgtgacaacattcgcatttttcatcgcgaaattaagatgttttttttcaatctcagccacttcgtcaggatcaaaaaagcaggatttggtatctaaatattcgcccaacgcacaaaacgctttagcgacactttcttgcacggggcgatttgggaaaaacaggtaaacaaccagagtcaccacgctatacagcaaggtaccgcataaaatcattacagggttaataaaccatacatttacctctgggatataagttaatgtggtgtaaagcgcaaccactaatgaaccgaaagcaatggtgctataacgctgccccacggcaccaatcatagtgaaaataaatgtcagcaccgtcattaacacaatatattggataggcttgccaatatgtaactgcacaataaaggaagaaatagaaaaggcaataagggtaaaaaatacgtttttcaatcgtccagttaaacggttatccaaatccaccaaaccacctgcaatgatccctagaatcaaaggcattgattgcgaagaaatatcaaaaaaccatattcccactgccgcaatatttacggcaataaaaacagggattgtagaaattactttagtatttaaccgaatattcatttcaaatccttatcaaaatagaaaagtgagcaacaaggctcactttttattgtataaagtgcggtcattatttatgggattttgcccagtttaagaaacgtgtttgagtttctttatccgcttgttggaaccaatattggagctgttgctctgcaacattttcgccctgaacaaccacttttcctttattcgcttttgcattacctgctggcgcaacagccactgaactcgcaactgttgttgcagcaaatttagaaactgatgccgctgcaccagacgcattatattcagcaagatcatttagcacattaccacttgggaataaaccttcttgttttaacacatccactttcgctgaaatagcattacctgattttgttttcacagtaatatttggcatttgattgaatttatcgccactatcaagattacgaataactggtgcggaaataaccaaatcttcagcattaccttgaaatgtcacaatcacaggattagattcaaaaagagattgattcgatcctgaaccaacaatttcatttaaacgcacaacaacctgatggttttgggtatcatctacagtaaatgtcttagcttttccgagagatttagaggctttttgaccatcaatcgctaaaaactcaaggttagatgacgtagaaaccattccagcaaaggttgccgtacttgtgcataatgtggcaagacctaatacaacagcgcctaatttcataattgctcctttggtataaatgaaatactcgcttatgctatgccaaattagccaaaatgaaaataaaaagtaagaattaatttaaaattttttgttataaatagcacaaacaatcacaatgttttattatgttggcgatctacacactaaaccagtgtcgtgaaaatttaatccattaaatatcaacgggagtaacaatgttgaacgatattttaacaggctatggaatttttattctggaaattttaacaattttattactcattcttgctattgttggtttgattatttcttatcgccaacataacaagtctaaagtgggagaattagaaattaaagatttatcagaagaatttaatgaacaagttcgtttattacgtgattttaatctttctgaagaagaacaaaaacaacgcactaaagctgaaaaaaaagcggaaaaacaaaatgctaaaaaacgcaaagaaaaattgaaaaaaggcgagactttagaagatgaaaagaaagcttgcgtatatgtattagatttttgcggcgatatttcagcctcagaaacaaccgcacttcgtgaagaaatttcagctatcttaaatgtcgccaaatctgaagatgaagtattactacgtttagaaagccctggtggcattgtgcataattatggatttgcagcctctcaattgtctcgcttaaaacaaaaaggcataaaattaaccgttgccgttgataaagtggctgcaagtggcggttatatgatggcttgcgttgccgataaaattgtatccgcaccttttgctgttattggttctattggcgttgtcgctcaaattccaaatgttcatcgactattaaaaaaacacgatgtcgatgtagatgtaatgactgcgggcgaatttaaacgtacagtgaccgtattgggtgagaacactgaaaaaggcaaacaaaaatttcaacaagaattggaagaaacacataaattattcaaacaatttgtctcacaaaatcgcccttgcctagatattgataaaatcgcaacaggcgaacattggtttggacaacaagccattgcattacaacttgtagatgaaatctcaacgagtgatgatttaattttggaaaaaatgaaagaaaaacaggtgcttaatgttaaataccgtttaaaaaaatccctaataaaaaaattcggacgacaagctgaagaaagtgcaattaatatcattcatcgttatagtacaaaacagtctagagactttatgtactaaacatttatccacaaaaaaagaagtttttatttctatgtttacaagacaaatctttgtcattaagatactcgccgatctttaggggttttattatatttaattcataaatcaagttgagtattgttaatccaaatattgcgcagctaatcgtttaaatgattagctgcgttttttatttcaataacaaaatcgcaacttaccatttccccttagcaaaattttctattgttcttgcttccataaatagggataataacgtccctattcaaaaggcaaaaaaataatgacgcactatattttattgattatcggcaccgcattaattaacaattttgtattggtaaaattcttaggactttgcccttttatgggtgtatccaaaaaaattgaaacagctgtgggaatgggattagcaacaatgtttgttttaactgctgcttccctttgtgcatatttggtcgatcactatattctaattcccttaaatgccacttttttacgtacattagtgtttattttagttattgctgtagtggtgcaatttaccgaaatggcaataaacaaaacaagtccaacattatatcgtttactcggcattttcttgcctttgataacgacaaactgcgcagtacttggtgtcgcattattaaatgtaaatctcgctcataatttaacagagtctgtcgtttatggttttggtgcatctctcggcttttccttagtattggtactttttgccgcgcttcgtgaacgtttagtcgccgctgatatacctgccacttttcgcggttcatccattgctttaattaccgcaggcttaatgtccctcgcttttatgggatttacaggacttgtaaaataataaaatgatttaccttttaatgataataactctgttaattttatttattgggttcactcagtatttttcaggaaaaagaaagaaataatgacctttttattcatcgtaattacgctactcgctttaattttcggtgcgattttgggctttgcatcaatcaagctcaaagtggaagctgatcctgtcgtagagaaaattgatgctattttaccgcaaagccaatgtgggcaatgtggttatcctggttgtaagccttatgctgaagccatttgcaatggcgatgaaatcacaaaatgtattccaggtggtcaaacaactatcgtaaaaattgccgaaattttaggggttgatgtaccaacaatggagggcgtagaagaacctatcgagaaagttgcttttattgatgaaaatatgtgtattggctgcacaaaatgtatccaagcctgtcccgttgatgccattattggtacaaataaagcaatgcacacgatcattcccgatctttgtacaggttgcgagctttgtgttgcgccctgcccgacagattgtattttaatgattcccgtgaaaaaaaatattgataattgggattggaaatttgatgcaaaactcgttattccagtaatgaatgtcgatggctctgaaaaaaaattggttgtgggggaataaatggcggacgtattatctcgtttcaattccggtaaattatgggatttcaaaggtggcattcatccaccagaaatgaaatctcaatctaattcacagccattacgccatccgcctctcggctcggatttttacattccactcaaacagcacctaggaacaacaggcaatcttttaataaaagagggcgattacgtcttaaaaggacaagccttaacaaaaggcgatggcttgcgtatgttaccagttcacgcacccacttctggcacaattaaatcgattaaaccttatgttgccacgcatccttcaggtcttgatgaacccacaattcatttacaggcggatggtttagatcaatggatcgaacataatcctattgatgatttttcaacgctatcgccagaacaacttattcacaaaatctatcaagcaggtatagcaggtttaggcggtgcagtattcccaactgctgccaaaattcagtcagcagagcaaaaagtcaaactcttaattatcaatggtgcagaatgtgagccttatatcacttgtgatgatcgtcttatgcgtgaacgcgctgatgaaatcataaaaggcattcgtattttacgttatatattgcaccctgaaaaagttgtcattgccattgaagataacaaaccagaagccatatcggcaatccgcaatgcactacagggagcaaatgatattagcattcgggttattccaacaaaatatccttcaggtgctaccaaacaactgatttatttgctcacagggatagaagtgccaagcggtgagcgttcatccagcattggcgtattaatgcaaaatgtgggaacaatgttcgcaataaaaagagcagttataaatgacgagcctttaattgagcgtgttgtcacccttactggaaataaaatcgctgaaaaaggcaattattgggtgcgtcttggcacacccatttcccaagtattgagcgatgcaggctatcaatttgacaagcattttcctatatttgcaggtgggccaatgatggggctagagcttccaaacctaaatgcgcctgtgacaaaacttgtcaattgtttacttgcgccagattatcttgaatatgccgaacctgaagcagaacaggcttgtattcgttgttctagctgttctgatgcctgcccagtaaatttaatgccacaacaactttattggtttgcacgcagtgaagatcacaaaaaatcggaagaatacgctctcaaagattgtattgaatgtggaatttgcgcctacgtatgcccaagccatattcctctaattcaatatttccgccaagaaaaagctaaaatctggcaaataaaagaaaaacaaaagaaatcagatgaagccaaaattcgctttgaagcaaaacaagcacggatggaacgtgaagaacaagagcgtaaagcgcgttcacaacgtgcagcacaggctcgccgtgaagaattagcacaaactaaaggggaagatccagtcaaggcggcactcgaacgcttgaaagcgaaaaaagccaatgaaacagaatcaacgcagattaaaacactaacctcagaaaaaggagaagttttacctgataacacagatttaatggcacaacgtaaggcacgccgtttagctcgtcagcaagcagcacctcaaatcgaaaatcaagaacaacaaactcaaccaaccgatgcgaaaaaagcagcagttgcagccgcacttgcccgtgcaaaagcaaaaaaacttgcacaagcaaatagctccagcgaagccatttcaaactctcaaaccgcagaaaatgaagtagaaaaaacaaaaagtgcggtagaaaaaacacaagaaaattcaaccgcacttgaccctaaaaaagcagccgtagccgcagcgattgctcgagcaaaagcaaaaattgcgcaaacaaatagcaccagcgaagctatttcaaactctcaaaccgcagaaaatgaagtagaaaaaacaaaaagtgcggtagaaaaaacacaagaaaattcaaccgaacttgaccctaaaaaagcagcagtagccgcagccattgctcgggcaaaagcgaagaaactggcaaaaacacaagcaacattagaaaataatcaggaataaaataatgtttaaaatggttagctccccacatacccattcgggaaaactcacagcgcatattatgctttgggtcgttttggcaatgatgcccgcttttttcacgcaaatttattattttggatttggcgtggtgcttcaatccgcattagccattggtacggcaatcattgcggaatttattgcaataaaattacgaggtaaaaaaccgctcaattatctttcagatttcagcgtagccctgactgcgttaattttggcaatggctattccaccttatgcaccttattggattatcatcattggaacactctgtgcagttttattaggtaaacaggtttatgggggtttagggcaaaacccattcaatccagcgatgattggctatgtaattcttctaatttcattcccattacaaatgacaacttggataccaccaattaatttattacaggaaccaccgactttttcagatgcattttcattaatattttcaggtttaaccacggatggatttacgctttcacaacttacgcataacattgatggtatcacccaagcaacgcctttggatagtgcaaaaattttctataaaagtcacactcaattaaatgatttttatgaattaattaaactgcctatctttatgggtaatggaaccgatttcgctcaaggctggtggcaagtcaacgtggctttcttagcgggcggaattttccttattttaaggcgtgtcattcactggcaaattccagtggcgatgcttgtcacctttttctgtttagctaccgcgactgcttttactggtttcacacatttaagtgcgattagccaactcgttagtggtgcaatgatgtttggtgcattttttattgcaacagatcctgtcacagcctccattacaccacgcggaaaaattatttttggcgcattagtggggttatttgtttatctcattcgttatcacggaaattatccagacggcgtggcattcgccattttattaagtaatatttgcgtcccacttatcgatcattacacacgtccgcgcgtatctggttatccaacaaaaggaagaaaataatgggtacagtaaaaatcacatcgcgttatggcatattgttaggctttattgccctactttgcacagcaatttctgcagggatttatttcctaaccaaagataaaattgatgcggtaatcgcagcacaacagcgaggattacttctacaagttatcccacaagattatttcaacaataatttgctagaaagtgcggttattcctcaagataaaaattttgtgggtatccaaaaaatttattttgcgaaaaaagatggaaatatttctgcctatgcctatgaaaccaccgcgccagatggttattctggtgatattcgcttgcttgtgggattagatccgaaaggcgaagtgttaggcgtacgagtaatcgaacatcacgaaacaccaggcttaggcgataaaattgaacgccgaatttctaactggattttaggtttcacaaatcaatcgattaatgaacataatttaagcgaatgggcggtaaaaaaagatggcggaaaatttgatcaattttctggtgcaaccattacacctcgcgcagtggttaatcaaactaaacgctcagcattaatcatgctaaataatcaagccttgttacaacagctttcaacacaagtgaaataatatgacagatttaactgaaaaaaataccgcacttgaagaagaaaaaatagaaagtgcggttgaaaatcaacaaaaatccatctggaaagaaatttttgctcaaggaatttggaaaaataaccctgcggttgttcaacttctcgggctttgtccacttttagcggtgtctagcaccgccaccaacgcgcttggtttgggtttagcaacaatgcttgtactcacttgcacaaatacggtcatttcccttttccgtcaatatattcctaaggaaatccgtattccaatctacgtgatgatcattgcaaccacagtaacagcggttcaacttttaatgaatgcttacacttatacgctttatcaatcactggggatttttattccattaattgtgaccaactgtattattatcggtcgcgcagaagcattcgcctcaaaaaacagcttactccattccatctgggatgggttttcaatgggattaggaatggcacttagtctaaccatactcggcgcattacgtgaaattattggacaaggcacgatttttgagggcatagaaaatctattcggcgaacaagcaaaatttttaacgcaccatatttaccatacagacagtagctttttacttttcattctgccaccaggcgcatttataggcttaggcttgctcctcgccataaaaaatcgaattgataatgtaaaaaaataaagcaaccaaatcttgccttcccctgcttgcgggagaaagtgtcacgaagtgacggaagggaggcttacagtcttctaaacagataattccaataaattaaataggctaatttctacaaaaatatgaacaaaacaaaaagaatcgaaatactcacaagattacgagagcaaaacccccatccgaccacagaattacagtataattcgccctttgaattattaattgcggtcattctatcggcgcaagcaaccgataaaggcgtgaataaagcaacagaaaaactattccccgtggcaaacacgcctcaagcgattttagatttaggattagatggtttaaaaagttatattaaaactatcgggctttttaatagcaaagcagaaaatattatcaaaacttgccgagatttaatcgaaaagcacaacggcgaaatccccgaaaatcgtgaagccttagaagcattagctggtgtgggtagaaaaacagccaatgttgtgctaaatacggcatttggtcatccaactattgcggtagatacccatattttccgtgtatgcaatcgcactaattttgcagcgggtaaagatgtggtaaaagtggaagaaaagctgcttaaagtcgtgcctgatgaatttaaagtggatgttcatcattggttaattttacacggtcgatacacttgtatcgcgcgtaaaccacgttgcggatcttgcattatcgaagatctttgtgaatataaagaaaaagttgaattttaattttacggtaaaacagcctaattatttaccgcactttttattaaaaataggataaaaaatgataacaaacaataaacagcgacaaacttggtcgagccgcctcacttatgtaatgacagtcgcaggcgcaacggtcggtttcggtgcaacttggcgtttcccttatcttgtgggagaaaatggtggcggtgcttacgttttacttttctgtatcgcaatgattgtaatcggtatcccaatgattttagttgaaaacgtgataggtcgccgcttacgtgtaaattccattgatgcattcggcgataaaattctcgacaaaggaaaaggcatttctaaatattggaaaatattaggttatatgggcttactcggtgcatttggcattatggcgtattatatggtgcttggtggctgggttatttcttatgtcattagcctaatcagcggtacattagacatttcaacccccatcacaaaagacattgccaaaaatttctacgatcttcacatcggcaatagcccttatgaaattatattctacaccctcttatttgttatcgtgaattacattattttagctaaagggatcattggtggaattgaacgttcggtaaaatatttaatgccattactatttatcttcttaattggaatggtaattcgcaacgtaacattaccgggtgcaatggaaggcattacattctatttaaaaccagatttcagcaaaattaccccacaattatttatctttgttttagggcacgtcttcttcgcattaagccttggttttggtgtattaattaccctttccagttacttaaataaagaagaaaacttaatccacaccgccgtaattacaggtttcaccaacacaattattgccgtacttgctggctttatgattttcccctcacttttcacttttgggattgaaccaaacgcagggccaacattagtattccaaagtttacctatcgtattttctcacttatgggcaggtaaattctttgcaattattttcttcggcttattattaattgccgcactaacgacttccatcacaatttatgaagtaatcattaccgcattacaagaaaagctcagaatgcgccgtggcaaagcgattgtcttaaccctcggtgggatttttatcttaggtaatattccagcaattttaggggataatgtatggaaaaacgtcaccattttcggcaaaagcatttttgatttctacgattacgccagtggaaatattctctttatgctgaccgcacttggctgtgctattttcgttggtttcgtgttaaaagatgaagccaaaaaagaactttcttcaacaaaatattcaactttcatcaaaatttggtttaactacgtgaaatttgttgtacccttgatcatcttagttatctttatcagcaacctgttctaaaaattaaaaatgcggtaaggcgactacatcaccgacaccgctttaatttgaacatagacatcttgcccaacagcaaaacgtagttcattttgtgcccatttactgatacttgcccaaatcttattcccttccactaatacggcaagatccactcgagaatcttgtatctcaatttgtgtaattttgccacgtaaaatattacgaatgcttgtttgttctggcttttgcagagtgatagaaacatctgaactataaatacaaactcgcactcgctcgcctacattcgcgggcacttgatgaatccaaagcacttgttcgcctagcgaaagtgcggtcattttataaggtggattatgcaaatgaacaggcaaggcaagtacactgctctgttcgttttcccctttccaaggggcaaaaatagggctattccaaattttttctacgcagtcataggcttgcacaatgccgttttccatcaatacgacccgatcagctaaacgcaacagttcgtccaagctatgtgtaacatataaaatcgggatattaatttctttagaaagacgttccaaatattgcattagctcgcgtttgcggggaacatcaagggcagaaagtggttcgtccatcagtaaaatatcaggatcagtcagcagcgcacgccctattgccacacgttgtttctctccgccagaaagcgtgagcggataacgctttaataagtgagtaatgccgagaagatcgacaatatagttaaaatcatcttgcgatacatttttcatgccatagcacaaattacctttcactgtgtagtgaggaaataagcgcgcatcttggaacacatagccaattttacgcaagtgggccggcaatgattcttggctttccatatccactaaagtgcggtcatttaaacggatgaatccttcgtctggttgtatcaagccactgacaagattaatcaacgatgttttgcctgagccagacaaaccgaaaatagctgtcacaccttgatctggcacttgtatattagcttgcaaggcaagttgcccgagctgttttttcacattaatctgcaacatttccttgtcctaattttttctgcatccgcttgctcaaccattcagacagtaacaaagaaatcaatgaaagaatgatagcaaataaacataagcgagcggtttgttcttctgcagcgggtgtttgaataaaagaatacatcgcaaggggaatcgtttgagtttcgcctgcaatgttcgatacaaacgtaatggtcgcgccaaattctcctaatgatcgagcaaaaccaagaacgagtccagctaaaaccccaggtaaagaaagcggcaaggttattgtaaaaaatacacgccaagcggaagcaccgagtgtttgcgccgcttgctccaatttaatatcaatattttctaaagaaagtcgaatcgcgcgaacaaccaatggaaaggcaaccacagcagaggaaagcaccgcccccttccaactaaagccaaaagataagccaaaccactgatataaatacttaccaatgaaaccattgcgccccatcgcgacaagcaatagataaccgataaccacaggtggcaacactaaaggcaaatgaattacgccagtaatcagggatttaccatagaagtttttgcgcgctaagagccacgccacaaaaatggctaacggcaaactccaaagcatggaactgactgcaacactcaggcttaaattaattgctgagatttccattggcgtcagattgaaaaatgaaaaaaattgggtaagcaaaatgaatccttatctaaatagcctctctttaaatcccttgtttatgggaatatcccacattgatgagaggtaagatgctctataataacaaaagggcagaaatatccgcccttcatgactattaagattctatcttattttgcagagaaaccataccctacaagtactttcttcgcagcatctgattctaaatatttcaagaaatcgcgagaatccgcattatcatgaccttttacaatagaaacgggataaacaactggtttatggctatctgcagggaacactgcaaccgttttaacttgttggctaacttttgcatcagtgctgtacacaataccgtaaggtgcttctgcacgttcaactaaagctaatgcaccacgcacatcttttgcacgcgctaaacgatcttgcactttatcccataaatttaatttggttaatgcttctgctgcgtattgaccagcaggtacgtgcgcaggatcgccaacagataaatagctatcttttaatgcattgatccattcacctttagcaatatccacagaatttaccgcactttttgctggtgcgattaagactaaatcattgcccactaaaactttttcggtttcttttacggttaaatctttttcagaaagatatttcatccatttattgcttgcagatacaaaaatatccgctggtgcgccttcttcaacttgttttgctaaagttgaagaagaagcgaaagaaaacactacttcatttttcggattttgttttgcataatcttttgctacttgttgtaaagcatcagtcattgaagcggctgcaaatacagtcactttagcggatgccgcaaaagaaaagcctaatcctgcgattaaaagtgcggttgaaattttagttaattttttcatgaatcatctcctacgattaaacgttatttacttgattatatattgaaataaataacaatcatatagcaaaagaaaaattatttagtaaaatatataacgcttaggcttaccacttaggattacttagggacagcaaaatgaaaaacaccgaaattttactcacaattaaacttcaacaagcactttttatcgatccaaaacgagttcgtttactcaaagaaattcaacaatgcggttcgattaatcaagcagcgaaaaatgcaaaagtgagctataaaagtgcgtgggatcatttagaagccatgaataaaatcagccctcgcccattgctggaacgaaatacaggtggaaaaaatggcggaggtacggtgcttaccacttatgccgagcgtttgctccagctttatgatttattagaacgtacgcaagaacacgcttttcatatcctacaagatgaatccgtgccgttagatagtttactcacggcaaccgcacgtttttctttacaaagtagcgcacgcaatcaattttttgggcgagtggcacaacaacgaatcattgactctcgttgtgttgtggatgtgaatgtgcaaggattaccaacgccgttgcaagtttctattaccacaaaaagctcggctcgtttgaaactcattacggaaaaagaagtgatgctgatgttcaaggctccttgggtaaaaatcagtgaacaaccactggagaatcaatctaatcagttccccgtaaatatcaaatcactcaatgaagaggaagccatccttcaatttgctgaaagcaacattgaattttgtgccacagtccaccagccaaatcaatggcaaatcgggcaacaggtttggattcacattgatcaagagcaaattattttagcgacgctggggtaattcaaatatataatacgtaaattcaatacttatatttattgttttctgaactaaaataacctcaaatcaaacaaaattttaaataaaatatttaatttcatcgtatttcctatttacgtaaaaaagtttgataaagttttttcaataacgaggttggcaataaacgagaaccaaaacgcaatgcaaaagtaaataatccagataacaaaccctgaattcccaaacggtatttcaatttgaacaaacgccattctgctttagcttgattgacgccacgacggcgactcaccataccatttcccactctcgcataaactaaaatatctggcaaattcgccatatataaaccttgtgcgacaagtttgatccacaaataataatcttcttgaagatcttcatatccaccacaattaatgaccgcacttttttgatatgccaccgtcatgtgattaaacggacaacgtttttgcgtgaatttaataatttcttgagccgacgttggcacattacgatatgccacaatatcatttacatttttaccaaattcagcaatttgtccgccaaaaatgatgctttcagggtgctgttcaataaacgctacttgcttttcaaaacgatcaggcacgcaaatatcatccgtatccatacggaaaacccagtcataatcacaatgcaataaaccctcgtttaaggctttgcctaatcctcgattttgtggcaatttaactaattttaatggcagttttgtttcaaattctgtcacaacagattctaattctggcgttactacgccatcaaaaaccaagacaatttcatctgcttgacgagtttgtgcaccaagactttcaaaacactcccgcaagaattgaggattttccttaatatataaggacattaggactgaaaatttcattttattttcccaaccgttttaaattaatggctaattttggcgaaattaaaataaccaaagtaataataaattgcttaatgctttttgttttcttaaaaatatcaaaataatattttgccgctttacgcgataaattcataatatggggataagccaaaatatagctcgcgttaatatcaaaattacgagcttgctctaccgttttcacataatgctcgcgaatataatcaatggctttttgcgtattagtggtatccgtagacacacttgagcgtttagtatggaaagtacaataagttagtggttcattaattttataaggggtaaaacttgactcttgtaacagttttaacaagaaatcatagtcttccaaagaacgaagtgcggtggataatccacctatttttaaaaacatctcttttttaatcgcaaccattggcatgccaccaatcttattggctaacaaaatacgttctgtcgagatttcttgaggttcaatcggttgagtcacataagtaaacccttcattgaccatttcacatttagctggatgataaataaaattaatgtctggattttgctcaatcacttgtagtattttttcacatttttctggcataaaacgatcatcatcatcgagaaaaagcaaccaatcgccctttgatgcacgcgcaccaatattgcgactttccgctgcaccttgattggtttcgttacgaatcactgtaactggaaaagaatagcgttgctcaacgactactctctctttggagtaatcatccacaataatcacttcaaaattactcgatgtttgttgagttaaactttctaataaagctggcacttctgcttttcgattataagaaggcacaataatgcttaacataattccttcctttaattagccaaatttttcttaatcgcaaagatttttttcaatggatatttcattaattttttaagtaaattattggataaagatccacgaacactttctaaattgcttatcaatacaggattttcaattaccatgagagggcgaaccactttatttcttatattaaaattctgttcaaagagtaaaaaatcatccgctaaccaaaatggtttattttgggaaatttgctggataaatcttcttgccgctgatttttttataagataacccaccgtgccagcaaaataacttttataagggaaagcgtaatttacattgcctgtttttttgcatagaaaagaaaaagttgtcggataattaatttctaaatcagtatcattgaaattattaatgtttgactgtccaagcaatataatttcagcctcaagtttttctgataaaagtgcggttaaattttgctgaaaatctaagtggaataaagcatcatcttcacagactaacgcatagctatcttcagcaatatcgttgtcttcaacaattttttgatataccgaaagatggcttaaggtacaaccgatctcgcccttagtgacattacgaaaataatgtgctttaaattgttcaatattaaaaatagaggctaattcatcccaatctttttgcatggtattaatggcagaaaaaatttggaaatcctcggtatttttttgagaaaagaataatttccgacgttgaatatctttatctaaagagatcaaatatttttttaacataaaattattccttataaaatccctttccattcttcaataattttctcaatgccataatcttcactcattaaacgagatttgtctgacatttgttgataaagttcaggattattgattaataaatctaaacctttaaccatttcttcaatattatttttttcacaaagaaaaccattttctttatgttccactaattgctttacgccaggagaacaattaaaggcaacaataggtaagccaaatgccatcgcttcaataacgactaaaggcaagccttctgtttgtgaaggtaaacaataaattgaactgctttcataataaaaagaaacatcattagtacgaggaataaaattaactgaatcttcaatatccaatgctttagcaagattttttaaattctcttcttcctcacccgatcctactatttttaaattccaatctggatatttttttgccaaaacttgccaggcttttaataaataatcaaaacctttataagaaaataaatgccctacagataaaatagttttattttccaattttgctaatttattctttggcaaaagcgtatttggattagcaatactaattatattatttgttttaaatttttcttgccacagcgttttttctgcttctgtcaatgtaactattttatcgcaagttgttacagctaaatatttaccgagcgtgcgaacgagacgattgcccgtaaaattaaaagaataatgctcccataaaatatgttttatatttaaattaaccaacgccaaagcagaaaaaagcataattgcaccatcaaccacaattaaggtatccagctgtaattctttaactaattctcttaattttttagtgatagaaaaataatcttttttcaatgaatagggcaatttattcattgcgtaaatattaattctttcatcgatttggaaaaaaggcttgttaccgccaatgctaataaaagaaacatcatatccctgtttagcaagagcattagcaacattaatggaaacgcgctccgttccacccgcactttcgatattcattataaagaaaccaatttttttcattttaaatttccttataaatcgttaatccaaggtctggaaatgaatcgtaacagaattgccatcttggaatactcgttctaataaaacgaatttctacattaggatgacttaataaattaaatgcaacagaactgaagaacgtataaataattatttttttatttgataaatgtttaaatacgtaatcttcaaaaattaattcagattcaacataatttaccccatcaactcgataatcttctgctggatgagggaaacaatagtcaaaaggaatctgatcttttaatttttttattaatgagatgttttcctcttttgtatttaacaatggttgcccaataaaaaatgagacctcaccatctatctcgcaatctatttgattatcccataaagaaattggttcaatattagaaacaatatttttgtaattaggataaaccgtataatgtttttttatttttttaaataatttattcacactatatttatcgccaataaaagctttaatcagtttatatttaaatgtgtcaggctctctcaataaattaggatgtgggaaaatattatctgaaccatcatcaaaggtataaagctctttaaatgaaacatgactaagataagtttgtagccataatgaattaagattggcgagaaaaaccttatcaaaacctttgtgcgtaattttattcttaagctggcgcattaacttaagagaatcgaaaccttttagatcttttcccgtatcaatattcatcgaatcactacaaacctccgctaatttactcgcatacaaggttctttttttatcccataccccaccaaacattacgccaaagaattgctcgttaggatgtaattcaattatttttctcgcaattaatacttgcaatggtgtacaacaaagaatgagattcatagggttttactcactttagatgtcataaaataaagaataggaataatggaaagcgaaccaataattccagcataagggatatatttaatttctgtaaaagttaaagccacaaggcttgccacataaataactgtagataaaaccgaacattgggaaataagtttatttttcccataatagaaaagataattaactaaaatcaaataaggaatacttaatgtggtcgaaattaaaaataaaataaaataatatttcgttcccacaaattgactacctaaaatccaaactaacacatcctcaggaataatccacattattaaggcaggaataggtattagcaaaaaggaaaataacgcccatttatgtaactgttgaataactaattttttttgttttaaggcttcataaaaataggggataatcgctttattaagtgcttgaatagcaatagaaacaattaaagcaagttgagcccccatagcataaagccctaaatctgtttcactgaatttgtgataaataaaaatacggtctaactgcccttttaagaaaaaacttgcataatgtaaaataagcggtaatccaaatcctaaaatataaaataatgcggattgataatgtttaaattgatattttttagatgtcgtactctttctgtaaagaaaataagaaaaaaaccagacgactaaattactcaataaaattgccaaaattcttttttcaacaagatcattttgataatactcaagcaatgcgacggtaaatacagctcccgtaacagtaagtgaaaattgaataaaagcataagaccaagcctttttctggcattgtcttacacttagctgaacatttaagaaagactgaaaaattgaggaaagtgccgcgtaaaataatatttcagactgagcaatccaacagccaattaaaataatactgccgattatcgtggtataagcatagccggtattcaccactaaatttaatgaacgttttccgtaaaaataaaaataacgggaaattgcgccttcttgagttaaagaaaccacaattaaaaataaacttaaaaaagtttgataataagaaagtgagccatacccttctacgcccaatttacgggataaataaggcaaaagtaaaaaaggaactaactttgacgataattccccaacaaggtaaataacactgtctttaaaaactttcataaatatcaccgcacttttgatgaattcgagcgttcgtttatcaaaaaataagggggcttattttaacaaaatcaacatagacaagctatgactaatcattataatgaaaccgctctatatcaaggatcttatctatgttagaactcggaaaacttcttaccgcacttatcgcaccacctcttaatacctttgtattactgattattgcagcgattatttattgtgttcatttcaaaaaattagccaaatttcttgcgattataagtttcacttggctttatatcatgagtgcaccttttactggtttattgctaacagataatgatgacattccagcccttaccctagatgagtataaacaagctcaagccatcgtgatattaggcggtggatcttacccaaccaaagagctgtatgcagaaacggcttctggtgcaccacaactagaacgtttacgttatgcggcatttttacaaaaggaaacgggcttgcctattttaaccacgggctattctttgataggcatttctgaaggcgatttaatggcaaaagaacttaaccaattctttaatgtgccaacacaatggatcgaaaataaagcccgtaatacggaagaaaatgccagtttcactaaaaatattttaattaaagatcatattcaaaaaattattttagtaacaaatcaatggcatatgaaacgagccaaatatctttttgaaaaacaaggatttgatgtacttcctgctgctgcagcaagctatggcagcaaaggaaatctatctgcaaaatcttttattcctgacttaggtgcattgaatagcaatatggttttattaaaagagtggattggttattggaaagcccattatgtagaataatttgcttataaaactcgatgacttgttgtttgaaaagaaaattgtatttgctcataaaaaatctacaccttagttagttgtttagtccaacttttggggtgcagatcaattcaaggcttttttattatattcaacattttacctataagaaaaaccgaatcccatagagattcggctttaattatgttgtgtttgaaaattattctttatgtattatgacttacgctaattccgcacgtaattttttcgttacatccaccatcacttttaattgatcgatagtttctgcccaaccacgtgtttttaaaccgcagtctgggtttacccataagcgttcttttggaattacatttaatgctttgcgtaataaatgttctacttccgttgccgttggcacacgagggctgtgaatatcataaacacctgggccaatatcatttggatatttgaaatctgcaaatgccgttaataattccatatctgaacgtgaagtttcgatggtaatcacatccgcatctaatgccgcaatggcaggtaagatatcgttaaactcggaataacacatatgagtgtgaatttgcgtatcatcttgcacgcccattgagcttaaacggaatgcttcgcctgcccattgtaagtatgcgtcccaatctgcacgtttaagcggtaaaccttcacgaatggctggttcgtcaatttgaatgactttaatgcctgctgcttctaaatctaacacttcatcagataatgctacgccgatttgtttacatacggttgaacgtggaatatcgttacgcacgaatgaccattgtaaaatagtcacagggcctgtgagcattcctttcattacacggttagttaaactttgcgcatattgtgaccagcgtactgtcattggctcagggcgggtaacatcaccgtaaattactggtggttttacacagcgtgaaccgtagctttgtacccaaccaaatttagtgaatgcgaaaccatctaataattccccaaagtattccaccatgtcgttacgttctgcttcaccgtgaactaacacatctaaatctaattcttcttggcgacgtactacatattcgatctcttttttcattgccgcttcgtaatctgcaagagataactcgccttttttgaaactcgcacgtgcgtgacgaatttcagtagtttgtgggaatgaaccaatgtttgtagttggcagaagcggtaaatttaaccacgcattttgcttaacaatacgttctgcaaatggcgatttacgttgatccgcaccttttggcaagtttgctaaacgttctgccacttcagggcgatgaatttcttttgacattgcgcgtgcatctgctgccgcttggcttgcatctaatgctgcttgtacagatgctctgccattatttaacgcttgttttaatacgtttaattcttctactttttgtagcgtgaaagataaccagctataaagtgcggtatttttttcttttaattgtacttccacttctaaatcaaatggggtgtgcaataatgaacagcttggtgcaatccataaacgctcacctaattttgcttttaatggctctaatacatctaacactttgtttaagtttgcacgccagatattacgaccttcaatcacaccagctgataacactttgctgtaatcttcaaatgccgcaagttgttctggtgcacgaactaaatctaaatgcaagcctgcaacaggtaaggcttttaataattcagcgtgttctgcaactgaaccaaaataagtggctaataataattttgcgttcactttgcttaattcagtgtaaacagatttataggcttcaacccattctgctggtaaatctaatgctaatgcaggttcatcaatttgaatccactctgctccttcagccactaatgcatttaatatttcaacataaacaggcactaattgatttagtaaatcgaaacggttaaatgcttcgcctttttctttacctaaccataagaatgttaatgggccaacaatcacaggtttgaagtttaagcctaaggcttttgcttcacggatttggtttacataatgtgctggattagctttgaaagcggtcgatttttggaactcaggcacaagatagtgatagttcgtatcaaaccatttggtcatttcaattgcgaattgatctttgttaccacgtgcaagttggaaatattgatcaagggttaaattttggctatcaaaaccaaaacgaacaggaattgcccctgttgccacttgtaaatctaaaatatgatcgtagaacgtgaaatcgcccactgcaacgaaatccgcattcgccgctgcttgatgtttccagtttttttcacgcaacgctttcgctaaatctaataaatcttgctctgctaattctttacgccaataacgttcttgtgcgaattttaattcacgttttgcccctacacgaggaaagcctaaaatatgtgatgttgtcataataactcccaatttaaagtaatttttttaattatttagacggctaaacgtctataccaatatagaatgcttgatcttcatttattatgcaaacttattattttcaggatttacattaaataaattcataatcaagcattcttttatctatcaaataacgatgaatcaattcagctaacttatttccttaaaattaatctcgcttacgacttaataaccaccaaatcattacaatgaaaagcaagctcgggatcaatgcaccaaaaatagcaggaataccgtaaactacactcgtttgtcctaaaatttcattaacaacataaaataagaatcctacacaaatcccagtaactatccttgcacctgcagtcacactgcgtagcgagccaaaaataaaagataaggctaataacatcattacgccaacggatacaggctggaaaattttacgccaaaacgtgagttcaaaacgactcacatcttgccctgtttcacgcagaaatgaaatgtaatgatataaacctgagatagataatgatgtcgggcgcaaagaaaccgcacctaatttatctggcgtcaaactagtttcccaagtttctgataaatgattcgttgtgatgatttcctctttcgtaatcgttgaatgattaacttgacgcaatgtccatttagcttcatcttcagaataactcgcctggtttgcatgttttaattttattaaattatgctgttgatcaaaggtataaatataaatatcgtctaattttgtatcatccgtcacacgcctaacaaatacaaaatgatgaccatctttcgcccacacaccatttttaattgaaagtattgaaccaccagaaagagccttagcgcgcatatctcgtgcaaattgttctgtttgtggaattccccactccccaataatcattgtaaatactactaatggtaatgcagttttcattaccgctatacctattttaaagcgagaaaatccagctgattgcataataacaagttcgcttctgctagcaagattacctagtgcaattaatgccccaagcaatgctgccataggaaagaaagtttcaatatctttcggtatagttaaaccagtaaaaattaccgcttgccaaatatcataagtgcctttacctacactacgaaattgttcgacaaatttaataatcgccgacaatcccactaaagtcattaaagtagcaaaaatcgcgccaagaatactttttccaatataacgatcaagggtatttatcattttgccgatcctttcttactgaataaatagcgaaatttatacattatttcactgtcccagctattcaacaccacagcaagtaagaaaaatccgatattaacaagcggcattaaaagttcagcctctaattttcccgctgaacctgcagatttaaaagagctttgtaacaagaaataaattaaatagagtaaaagtgcgggtaaaattttggcaaatctaccttgtcgaggatttacgcgacttaatggtacagcaatcaatgccattaatggcactgccaaaattaaggtaatacgccaatgcaattcagctttcgcagaagaagaatctaaatcgataagttgagacaatgttaattctgctacttcatcattggtattttctgcggattgataacctaaataggcgtgatattcatcaaaatgcgtaatgcgaaaatctggcaaagcggaggttccttcaacccgttttgtatttttcaaatttaagacttgatcaccatttggcaacgcaattaattcccctttttcagctgttatcactgaaggttttgtttgtttttgaggtgtcatttgaaataaataaacattgcggatttgattatctttaatcttatcaataaataacacaacgttattgttattggtagaaataaactgacctgaagacagcacgccaacggttggattagcctttgcatcttccaccatattcacttgtttttgaattgcccaaggcgaaagccataatgcgttataagcggcaatacctgccgttaataaagacataatcagtgccactttaaccaaaatccgttgccccacaccgcacgcgcgcatcactgtgatttcactttcagcgtaaaggcgaccaaaagtcagtaaaatcgcaataaataaacatagtggcaacatcaactgcgccattgtcggcattcctaagcctaataaagagaaaaccaaatcagctggcacattcccatttgccgccgcacctaatacacgcacaaactgctgactaaaaaaaatcaatagcaaaattagtaaaattgcgatttggcttttgaaaacttcttttattaaatatcgaattaaaatcatcttatttcgtttgtttttctaaatctaaaacggaggaaaactggataaaatcggtcgcatatgataacttattttcgctgaattaaacagaaatttaaggacaacaaatgaaatatcaagcaaaaaataccgcactttctcaagccactgattgcattgttttaggcgtctatgaaaataataaattttcaaaaagttttaatgaaatcgatcaattaacccaaggttatttaaacgatttagtcaaatcaggtgagctcactggcaaattagcccaaaccattttacttcgtgatcttcaaggtttatctgctaaacgcctattaatcgttggctgtggcaaaaaaggagaactcacagagcgtcaatataaacaaatcatccaagctgtattaaagacactaaaagaaaccaacacgcgtgaagtcatttcttatttaactgaaattgaattaaaagatcgcgatctttattggaatatccgctttgccattgaaacgattgaacacaccaattatcaatttgatcatttcaaatctcaaaaagcagaaacctctgttttagaatctttcatctttaatacggattgtaatcaagcacaacaagctatttctcacgccaatgccattagctcaggcataaaagcagcacgcgacatcgcaaatatgccaccaaatatttgtaatccagcttatcttgctgagcaagcaaaaaatttagcagaaaattctaccgcactttcattgaaagttgtggatgaagaagaaatggcaaaacttggaatgaacgcttatcttgccgtctcaaaaggctctgaaaaccgtgcttatatgtctgttttaacattcaataatgcgccagataaaaacgccaaacccattgtacttgtaggtaaaggattaacctttgatgctggcggtatttcacttaaacccgccacagatatggatgaaatgaaatatgatatgtgcggtgcagcctctgtcttcggcacaatgaaagccattgcacagttgaacttgccattaaacgttattggtgttttagcaggttgtgaaaatctgccagatggcaatgcttatcgcccaggcgatattcttaccactatgaatggtttaaccgtagaagttcttaatactgatgcagaaggtcgattagtgctttgtgatgcccttacttatgttgagcgttttgaacctgagcttgttattgatgttgcaaccttgactggtgcttgtgtggttgcactagggcaacacaatagcggcttagtttctacagataacaatcttgccaatgcactactccaagccgcaacagaaaccactgacaaagcgtggcgtttaccattaagcgaagaatatcaagagcaacttaaatcgcctttcgccgaccttgccaacattggcggtcgctgggggggcgcaattacagcgggtgcatttttgtctaacttcacgaaaaaatatcgctgggcacatttagacattgcaggtacagcttggttacaaggcgcaaataaaggtgcaactggccgccctgtttctttattaacccaatttttgattaatcaagttaaataaccacaaaactggcacacgttgcacctttaaatcgattactctgctagttcggtttgctcgtgtgccattaactcttgccccacatcatcaagcaaacttagataacgttcatattgtttcaacatatcggcaatcaattcatcttgatccatatattgaacatcataaccgactcgtccatcaaaaaaataagtgtaaggctcgtaagtaacactatgctgaatgtgcggtaaattttcatcgttaattaattgctctgacacttctcgcccaacagatttaataccatacataaaatctcgcattgattctttatgaattaccaattccaaagctggctcttcttgttcaaataatgtgttgatttctacacttaaattatattttcctgttaattcttgacgtaattctcgcatagcgggtaacgccgtatttttaaggaaacgtaaaatatctttctcttgcgtttggttcatcatttgctccaaatgtgatttccatttatcgccgctccagaaaatactagttggattgactttagtagaaaaatattttttatccgcaattaagcctttccataaactaaaacacattaccaacatcaataaagcaaaaggcaaggcaacaattaatgtcattgtttgcaaattagcaagtccaccagattgcataagcacaatcgcaacaacggacattaaagttccccacattatggcttgccacgcaggcgaagctaaacttttatctcgagatgcaatgttatttaacacataaatacctgaatccgctgaagtgataaaaaacaatgaaatcactaataagctcacaaagcctgttattgttggtaaaggtagataatttaaaaatttaaataataaaatttctggggaagaaataaattcgccaagcccgcccgcagcaatgccatcatttagccatactgctgtattaccaaaaacagtaaaccataaaataccaaataaacttggaataactaatacgccaaaaataaattcacggatagttcgccctttagaaatacgcgcaataaataaacccacaaacggagcccaagaacaccaccaagcccaataaagcacagtccatccgctaaaccagctagtatgttcttgttcataagcataggttttaaaactgagttgcactaagttgctgaaataattaccaatattgtcgctaaatgcagataaaaggtataacgtaggccctgcaattaaaacgaaaagaagtaaacaaaatgctaaagttaagttaatttcacttaatattttcacgccttttccaataccagaaatagcagaaaacaccgctaaacacatcaccacaacaataacgccaacttgtaaggcaaagctgttctgacttatccaacctatttgttcaagccctgcaccaagctgtgatgaaccaaaacctaatgtagtaataatcccaaataatgtggcaagtaatgccataacatcaatcgcatcgccaattttgccattaatacgatcttttaataaaggataaaaacaagagcgcaacgctaaaggtaatttataacgaaacccaaaataagctaatgctaaagcaatggcgccatatactgcccacgcgtgaattccccagtggaacagagtatgaagtaaagcctcttgttgtttatgttctgcagaacctgctgtaatgtcagaaagataatgggttaatggttctgctacgccaaaaaacatcagcccaacccccattccagcggcaaataacatcgcaagccaagataagaaactaaattcaggttcttcttcatcctgccctaattttatattgccaagactacttactgataaaattaataaaaatcctaaaaacactgaaaaagtgagtacataaaaccaactaaaattagcaaaaataccacttttagcttgattcaataatgcttgagtttgctctggcgcaataaaaatcattgccatcagtaacaatataaaaaataacgtaacgccaattaccaaaggattaaatgacgttcgctttgtcataaattgagataaagacaaacttttccccttaacgattaagtgaatagattaaaaatagatttaataaacactgcctagaggcaaaaatgtgtaatggaaccactacaaagaacagcacatagaagtgcgattttgaaggaaacgttcagtaggaattgaaggattgtttccaaaaacttgtgtatattaacaaaatacagtcattatttcaaattagtgaaagctaaactaaaaaatgcggtaaaatttacaaaataatttaccgcacaaatatcatttattttaaagccatttctacaaggatattattgcttttaagccaattcttctcccctcttttacaacgttttctaaccgcactttaaatccgtgtaattccgcaattcgcataacaatagaaagccccaagccacttcccttttcattttgcccagctggacgataaaaacgctgtccaagttttttcaaatcttcaggttcaacgccaccaccattgtcctcaataataatctgtgaggatgaaatttttactgaaacgattgtatcttcaggacaatatttaatagcattgtcgagtaaatttctaagcatcaatgaaactaaaattgattgcccttgtttttgctttggttcagtttctttctcaaaaaccaaggtaattttacgtttttctgccacaaaataacgctcagcaatcagcgattgaatgatgccttcccaatcaataggctgtaattcttccaattcttgtaaattatctagttttgaaagcgttaaaagttgctcaattaactgcgatgcacgatcaatcccttgggttaaatgtaaaagtgcttgttctcgtaacgctacatcatcgccagctagttgcgcaacttcagtttgaatacgcaatgccgccaatggactacgcaattcgtgagctgcatcagaagtaaaacggcgttcgcgttgcaacatagctgaagtgcggtcaaaaaattgatttaaattttttactaagggtaaaatctcaacgggtagcccctccgtattcagcaatgacacatcgccagattttctcgtttgtacttcttggcttaaacgtttaatcggtcgaagttctttatgaatcaaccatcctaaaacaatgatcaaaataggcaaactggcaaaccaaatccacatttgcccaaagatcatttcttcaattaaatcttcacgataatctaattcttgccctactgcgataactaattctccattagctgccatacgccaaaaaattcgccatttatcgtcatcatcataaatattcgcattataaaaccccgttttataattaaaaataaaatcttttccatttcgcccatcactgaataaaagtttcccagttttagaaaaaatagcaaaggctaaggcatcatcgtcataacttttttttaataccgactgtgaatttttatttagcgttgtgctagattccaacaaaatagtacttaaatctgaatttgcgagccgttcagcaaagagaacttgttgtgcatcaaaaactttattcacatcgtggcgcacttgccaccaagccacaagcgtagaacccagccaaacaaaaagtgcggttaaacaaagcacagaaataagacgcaacgtaaggcttctatttttcatttttcaatttgtcctaaagcatacccaacaccgtgtaccgtgcgaataaattgtttccccaatttttggcgtaaattataaatatgcacatccaatgcgccactgctaatttcttcatcccaactggataatttttcttcaatggatgagcgagacaatacgcgatctttattcagcataaataattcaagcaatttatattcacggcttgttaaagaaatgggttgattattcagccaaacagaacgttgattctgatcgagcttaacaccagcctgttctatcacagaatgatgatatccataacgacgacgaataagtgcttgtaaacgtgcggcgacttcagccaaagcaaaaggcttgcaaagataatcatctgcaccactttgtaaacctttaactcgttcatctaaagtatcgcgagcagtcaaaattaatacgggaacatcttgatgattagatcgccattgttgcaatacctctaatccgtcaagtttaggcaaggttaaatccaataccaccgcatcataaggcgcagaggttaaagcagccattcctgtttttccatcggtaaaccaatccaccgcaaaaccaagtttagttaaaccaatctgcaacccattgccgattagattatcgtcttctattaataaaattctcataaaaaattgaccacactttataaacaaaaatagcgagctaatgcccgccattttgaaagaatgattattctactttttcgatacgtaatacatcaagctccgctttctcaaatacctcattatccaattttccataaattttcactttatccttagaatctacgtttaaaccattccaaacgcgttttttaatttcaatcttgatttgcccagtcccatcagtaaaccaaaactcatcgtcatcaatttgctgagtgatattccctactaaagtaatcattgaattatcagccgcagataaagcttgttttacactaattgcagcaggggctgcttgttgaaaaccaccttgactattattgccattaaaaccagcaaatgctgaagtggttgctaatgcgaagattgttgctaatgcaaattttttcataacgtttcctttttaagttagttaatttcaagctccattgcttggatgtgtgtattaaaacaaataaatcttaataaaagattaagaggactatacttttttggtaagaccttatcaaggcaattttgcgaccactgcatagccttcaattaatccttccacttcataagacgcattaaaagcagcctcaccttgtttcaaagaaagtgcggtcgtttctgagcgtaaatttaactgaccattcatcaccaataaaatactcgcactttgtgcttttaaatgatgtgtttcgccacattcatattgaatattttgcaaagcgaaatcttttgctggcgtggcgtaagtaaatatgcgtgcgtcttgagaggctgttggaataatttaggctccacttcacgacaatcgacaattttaagcaattcaggaatatcgacatatttaggcgttaaaccacctcgaatcacattatccgaacaagccatcaattcaatattttgcccacgtaaataagcgtgtggaataccagcatcttggtaaattccctcgccttttttgaggtgcacaatattaaacaaatagaaacaaattaaaccagcatctaatttatctaaagaaatattcatcgcatcaatagtgtaaatcacccaatagtctggattagttaaatccagattattagcctgataagttgcttgtttttctaacagaattggggaaagccattggtgtaactgtgcttgttctgcctgcataatatcagcataaaaagcacgtaaatcttgttcctgcaatttttttgcaagcgggactaaagatgatcgcgatgctaaagtttcgataatatccgatttatttttaaaaccatgcaacaaccagaaatcagataaagcaatcatcatttcaggtttatgattgttatctttataagtacgtgttgatgcttttaaatcaatgcctttcgcattttcttccgctgaaatttattttttaccgtgggtaagtatacccacggttaattatagtagttcctctttgaggaaccttatcctctatcccaaagggatagccttaaaattagcctagggtatacttaccctaggtaactataataaataaaaaatccgcacaaaggcggactttttttaccgtaaacaaattatttctttaaggctaataccactgattctccagccactacttcgcctgatttttttacgatacaagaaatttcgtccatatttgaaattacgattggtgttaagacagattttgcttttgattctaatagcgcaagatcaaattcaatcacagtatcgccacgcttaacagattgcccttcttgcgcaatacgagtaaagccttccccctttaactcaacagtatcaataccaaagtgtacaaataattctacgccttcttttgattccattgaaaaagcgtgattggtttcaaaaattttaccaatcacaccatccactggcgcaacgattttgttaccaataggacgaacagcaacaccatcaccaacaattttttcagagaaaaccacatcgggaacatcttcaatattaacgatctcgccagagatcggtgcataaatttcaacttccacagatttgttttcttttgaaccaaataacttgtcaaataagcccattttaatctcctatccattcaagatggttgctattttaacgtaaaatcaaatacttttgtttaatttaatgaattttccagcaaaaattcttcaattaattgatcaatttctgcagcagtcggtttttgtaatgcagtatcagcaagcacttttgcatcttgaaaatttacattacggattaattttttaattcgaggtacagaaatcgcactcatactaaattcatctaatcccataccaagcaataataaagtcgcacgttcatcccctgctaattccccacacattcccgtccattttccttctgcgtgagaggcatcaatcacttgtttaattaaaccaagcacagaggggtgcatcggattataaagatgggaaataaactcattaccgcgatctacagccaaagtatattgagttaaatcgttagtaccgatactaaagaaatctacttcttttgctaaaaattttgcatttaccgcggcagagggggtttcgaccattaccccaacttggatattattatcaaacagtctcccctcttcacgtaattccgcttttaatgcttcaataaccgcttttaattcccgaatttcttctacagaaataatcatcgggaacattaccgccaatttaccaaaagctgaagcacgtaacaccgcacgtaattgtgcatttaaaatttcacgacgatctaatgcaatgcgaatcgcacgccatcccaagaatggattcatttcttttggtaaatctaaatatgaaagctctttatcgccaccaatatccatagtacgaagcacggttaaacgtccgttcattgcttctaccacttgtttataggcaataaattgttcttcttctgtgggaagctgttcacgatccataaataagaattcagttcggtatagcccaatcccttccgctccattacgttctgcgccatcacaatcacgaatcgtcccgatattcgcaaccacatcaaccttatgtccatctaatgtgattgcaggaagatcttttaatttagctaactctgctttttcctcagaaattttcgcttcaagtgcttttaattcatcaatctgagatgctgttggattaatataaacttggttattgatagcatctaaaattaaataatcgcccgtattgactaatttagtcactttatttgtgccgacaatcgctggcaattctaaagaacgcgccataatagaagtatgggaagttctaccaccaatatcagtaataacccctaatactttttcaagattaagttgagctgtttctgagggagtcagatcataagcaacaagaatagattcttcctgaatatctccaagatcaacaatgtacattcccaaaatatttttaactaaacggttagcaatatcccgaatatcgcctgcacgttctttcaaatattcatcatcaatttcagataacattgtcacttgttgatctaaaattttactcgccgcaacgcctgcattcactttatttgaacgaagataatcaagaatttcttcttctaattcttcatcctcaagaatcatcaagtgaccttcaaagattgccgctttttcttcgcctaaagaaattaatgcacgttctctaattgaattaagttgttctaccgccgcgttacgtccttcgtaaaaccgagcgacttctgcgtcaatttgatcatcagtaattttttgtgtatcaagaacaatcttttcttctttaagaacaagtgccttaccaaaggcaatacctggggatgcgagaatgccagaaatcatagataccttccgaaacaattaacaaagtaataaataaacaatagccataaaatttcacaattttatggctaagtaagaattattctaaagttggaattaacgcaactaaatattcaactgcctgttgctcgtcttctccatcagcagaaatggtaagtgttgttccctgcgttaaagctaatgtttgcaacttaaataagctctttgcacttgcacttttccccccagaggttactgtaatttcagaagaaaatgctttcgcttctttcacaaattgtgcagcagggcgcgtgtgtaaaccgtttggcgcaataatttccacatcttttgaatacataatgctacctcgactaatcaataattaaaaatataaaaccagaaaattgccctagtatcctttttcaaagcaaaataatcaagaataaacactaaaaagcctgaattaaatcataaaaataagctaaatagtttatttattattcacaatctcaatcgttaaactaatgaaaaatgacgttgtgattttgtttcacttaaactttcaattaatcgatgatagttatcataacgaacaggcgaaattttgccttgctcaacggcttcacgcaacgcacatcctggatcgctcaaatgtttacaatcacggaatttacaggtgcccaaaacatattgaaattctcgatagccttttgtgatttgctctgcatctaaatgccaaagcccaaattctctaattccgggcgaatcaattaaattaccgccttgtggcaaatggtaaagacgtgacgatgtcgtggtatgctgccctaaccctgatgtttcgctcacatcccctacttgagcgtttacgctaggcaaaatatgattaattaaactcgatttaccaacaccagattgcccaacaaaaatcgccgtgccttgtgccaaaagtgcggtcaatttttccatattttcaccgctctttgctgaaatcattaaaatttcatagccaatatcttggtaaattttaagttgttcttcaatttcttgacgctgttcctgcgtcaagaaatccactttattcaaaacaatgagaggcgtaattcccgcgatttcacacacaacaagataacgatcgataatatttaaggaaagcgttggcaatactgctgatacaataataatacgatcaatattcgccgcgatgggtttcaaaccatcataataatcagggcgggaaatttcattttctcgagggtgaatcgcctcaatcacgccgctcacaccttgtaattgttcattacctttacgccaaacaactttatctcccaccaccaaactcgacaaagtacgacgcaaattacaacgataaatttcgccttgttcattttcgacatctgcgtgaatagaataacgtgtgaccacaacgccttcttgcgattcgcccagcatttcatctgaccattcaatctcttttttcttgtggcgatgtaatgttttcacattattcgattgaattcttctagtttggttttgagttaatttacgtttagccataaaagtgcggtcgttttttcccttgtttttggtaaaatgaaaaaaatttttgcataggatacctgatattatgccattcgataaacaaaatcttatttggattgatttagaaatgaccggtttagaaccggaaaaagaacgtattattgaaattgcgactattgtgacagataaaaatttaaatattttggcagagggcccagtattagcggttcatcagtctgatgaattactcaataaaatgaatgattggtgccaaaaaactcacagtgaaaacggcttaattgaacgcgtaaaagccagtaaacttaccgaacgtgcagcagaattacaaaccttagactttttaaaaaaatgggtgccaaaaggttcgtcgccaatttgcggtaacagcattgcccaagataaacgctttttagtgaaatatatgccagatttagccgattattttcattatcgtcatttagacgtaagtacgttaaaagaacttgctgcacgttggaaacctgaaattttagaaggctttaaaaaagagaatacgcatttagcactagatgacattcgagaatcaattaaagagctggcttattatcgcgaacacttcataaaattagattgacgaaaacttcaacaaaaaatttctttttatgaaattgcccttgcaagccctaaaaatatttgtataatgcaacctcattcactgatgtgaactgcgggaatagctcagttggtagagcacgaccttgccaaggtcggggtcgcgagttcgagcctcgtttcccgctccaaatttcaatccctagccaaaaggctggggattttttctatctacaaaaatagatcaccaaaatcttaaaaagtgcggtgaattttctcaaaaaataaaggcttgtgatttaataacacaagcctttatttttttatgctttcttcaaccgtttggcacgacgtttcattcttcttacccagcgggtaattcgccatgcatgcgtaattgaatagacataaaggaaaaataaaatgaaaaagccaacaaacatcgcccactcattcacataataaacttcccctaaaataccgatagttgcacaaactgcagaaacaaacgtaatcaataaaaaggcttgtcttgatgttaaacccgctcttaccattaaatgatgaacatgtaaacgatctggacggaatgggcttttacctttacgtacacggcgataaataatcgcaaccatatcaatcaaaggaatcgcaataatccaaagtgcggttactggattcataggatgcccttttccttgcgtacttaataacaaaatccaaataatggtaaagccaattaatgtactcccggcatcccccataaacaccttatattttggtccaaatggaatccctagattgagcatcaaataaggtaaaattgatacgattaaagcaaaactccaatgtgccatatccatttgcccatctcgatacattaaaataccaatcgccgcaaaagaaacacaagagagtcccccaagcaatccatcaataccatcaatcatattaaaggcattaataatcgcaatagtggcaaagacagtggtaatcagcccaatagaaccgagcgttaattggaaaggccctaaaatttgaccaagatgatcaagataaacattcccaagatcgatcattaaaatcgccaatattgcttgaatgcctgctcttaaaaaagggctaatatcaaagcgatcatctaaaatcccaatcgccaataaaacaaaaatactgaacaaataaagatacggtaatcgaagctgatcccattccatcaaataatagcaaagatttccaacaaaaagcgatacgccaccgattagtggaattgtgccttgatgacgtttacgatagtttggcttatcaactaatccaatccaattggcaagtggtcgcatcacaatcaatgttaaaaatgcgccaagaaaagtaacaaaaatactcagcatagtgtgaccctaaaattttttataaaggataacataaggcaaatttacctagaaatatatttttataaaaaggactatccaatatttcgatacagcacgttacgtaatatttctctttgttgagaatccagagcttgcccaaatcgattcgtcaaaataaaaaagtcctcggctttttcgcctacggtggtaattttcgcatttaataaatttagatttaactcagtaaaaatctggctcacttgggctaataaccctgctttatccaacgcaaccagttccatttcagtatgttcttttttgttttcctgtaaaaaacgcacatcggtttgtacagtaaaatgttgaagctggcgattaggcacaatagaaagtgcgggtaatttttcactttgaagagctactgttagggcttgctctagttctcggcgacgatcaaattcaaccaattctccgttaagttctgtgatgataaagctatcaaaaacataaccatcttgtgtcgtaataatctgtgcatcgtggatactgaatttttttgccccaatggtactcaccactttattaaataagtgcggttgatcttggcaataaataaacacttccgtgccaccaagtgaaaagcgattactaattttcactaataatgcctcaacgaaatccaccagcaaacttgtatgccacgcgatttgctttggcgtattacgaacaaaataatcttctggacaacgagtccataattgctcaatcgagattggtgcaatatcggaataatcctgcgttaaaatttgttgtgcaagttttcggttttctgccgatttttctgaataatcaagcaattctttcatgccttgtgaaaattgctgttcagtaaattcatataaagaggcaaaaagcgaacgtttccagctattccataaattaccattggttgcacaaatatccgccaccgttaaacaggtcagataatctaatcgaacttgattttgcacggcttccgcaaaattcatgacgacttcaggatcatgaatatcacggcgttgcgccgtaattgacatcagcaaatgggattttacgagccaagcaagggtatcaatttctcggcgatctaaaccatgtaattgcgcaaagtctgcaacatccacagcaccaagttctgcgtgatcaccgccccgcccttttgcaatatcgtggaacaacgccgcaatataaagtaaagtgcggtcagaaagttggctaaaaattcgatgagcaatgggatgttcttgcgcactttcctgtgacagaaaactttccaatttcaacatcacgcgcaatgtatgttcatccaccgtataaatatggaacaaatcaaattgcattaagccctcaatggcttgccattgcggaagatacgcagttaatacaccatattggtgcatcggcataaacgcacgtttaattgcattaggttgattaaacaaacgcagaaatttttcccgagctgcaggaatttcgcataatttttgtggtaattgctctaaggaaatttgtaattgacgcaaagtatcagaatgaatattggcatgttcgtactgcgttaaataaaagaatagatctaaaattcgcgctggtttttcttgaaaaacaaagctattacgcaaacataagcattggttaatcagttgaaaatcatcgtctaattggtccatcacagtatcctgatttgatgaaagcacattttctcgataatgctgaatcaacaaattactaataagcgaaattcggtgcaatgcttggaaaaaacatttcatcattttttccacagctggattgccttcccctcgaaagcccaacaattcactaactttaatttggcgatcaaacaacagacgattatcgtaacgtttcaaaatcaaatgcaaagcgaaccgcactttaaataaaaatgcacgactttcttgtagttgctgatattcttgaggataaataaaaccactttgtaaaatagcctcaagggtcaaagcccccgaatggcgcaacgccacccaatacaacaaatgcaaatcacgcaagccaccagggctgtacttaatatctggctcaaggttataagccgtattatggtaacgttgataacgttctatttgctcttgcactttggcattaaaaaaatcttctttcgaccaaaaatcagcacgttttaccaattcatttagcgcatcaaagtgcggtcgatttccagtgagaaatcttgcttctaataaattggtggcaatcgtaatatcttgttttccttccgattcgcattgtgctaaggttcgaacactatttcccacctcaaaaccgcaatcccataaaaattggataaattgggtaatcttttcttcaatctttgggcttcgggtttgctcgactaaaatcaaaaaatctaaatccgacaaaggaaacatctcacgccgtccataaccgcccaccgcaattaaagaaatctcctgttgttcacttaactccatttccagccaaagttgaatcaataaggcatcataaaaatcacagcgattttcaataagctcaaaaatggaataacaagaaaaattctcgagctcaaattgcttgagattttctcgttcaattttgaccgcacttggcgttaaaggagaagatagtgtcggagaaaacagcatatgaattgccttttgttagatcgaagtcgttttattataaagaaaaacaaaaagggcgtatatctacgcccttatcttataattttatgtcaattacacattcaccataatccgcgaaattcgaccttctgcaatttcttcatcgcggatagtcattacttcacaaccagtttccgtgacaacaagttgatgttcatattgtgctgaatggctgcgatctttggtttttactgtccaaccatctcccattacgcgcacttcttttttgcctgcgttaatcattggctcaatggtaaacaccattccgggttttaaaatcacgccgccatcatcggcgtaataatgcaatacttgaggttcgcagtgaaattccgtaccaacgccgtgtccgcaatattcacgcacaacgctgaaagtctggctttccgtatatttttgcacggctttacctatttcatttaaacgaatatcgggttttacagtgcgtatcccaacatataatgcttcttgtgccgcttccactaattttttactacgaatattcgtttctccgcccacgatatacatttttgagttatcgccaaaataaccgtctttaatcacggtaacatcaatattcacaatatcgccattttttaacactttatcgtcacttggaataccgtgacaaacgacttcgttaatggaaatacaggtcgcctttggaaaaccgtgataattcaaacaagcagggataaccttttgttcatttaccatatattcatggcaaatgcgatcaagttcgcctgtggttacgcctgcttttacgtaaggttcaatcatcacaagcacatcggaagccaatttgcatgcctcacgcagttttacaatttctttttcagttctaattggaatagccatttttatctcacttttttgaaaaaactttgcgagattatagcacgatttctaggaaaaaactggattacacttgaatggagtaaagggttattagataatggcgagattgaaattttaggaaagtaggaaatagttatgatagatgatatggcggtgccactgacatttactgatgcagcggcaaataaagtaaaaagtttaatcagcgaagaagaaaatactgatttgaaattacgcgtgtatatcacagggggtggttgcagcggtttccaatatggttttacctttgatgaaaaagtcaatgacggcgatttaaccattgaaaaatcaggggttcaacttgtgattgacccgatgagcttacagtatttaattggtggcactgtcgattacacagaaggtttagagggttcacgttttactgtaaataatccaaatgccaccagcacttgtggctgtggttcatcctttagtatctaagatggattttcaatttacacattatcaaggcaatgtatccgtcaaatgttcaatggaacacattgcccttgctaactggttcaacacagaagtgcggtcaaattcagacaagattttaaccgcactttctactgcacaatcactctctgaaaatcaagaaaaaatcttaattggtgcggaatatacgttatttttaaatgctgatgaagtaatggtgcgtgccaacaatctcgccattgaatcagatgaaattttagaacaagatttccattattatgacgaagaaagccttgctttttgcggtacgcaagattttattcattttctccaatcttatgttgattttattgcttaactcactatgacttctcaacactccgctaaaaaatcatcgaaaaacacgccaaaaaataaccgcacttttaaaggttttttacttaaatttagcttcacagcacttgtcttaacgattttttacggcggttatctcgattggcaaattcgttctaaaatggacggtcaaatttggcatttgcctgcggaagtttatagtcgattagaaagtgtgaaaattgccgataatctcgcttttgatgaagtcattcaaattttattagataacgaatatcgccaaactacaatagttgccgcacctggcgatttcaaattagaagatgatagcattgtaatacttcgccgcgcttttcctttccccgataaagcagagcctcagcgagttttacgcttgcgttttaacaataataagttatctcgcattgaagatttagtcacagtcaaaactgttgatgaatttcgtcttgcaccaaagttgattgcgatgttgcaatcagacaacgaagatcgccttgctattcctttgcaaaattatccccgtttattaattgatacattaattttaacggaagatcgccgcttttatgaacataatggcattaatccagtggggattttacgtgcattaattgcgaatattcgtgcaggtcaaactgtacagggcggaagtacgctcactcaacaattagtcaaaaatttatttttatcgcgcgaacgcaccattacacgcaaagccaacgaagccttgatgtcattggtgttagattggcgttacgataaaaaccgaattctcgaaacctatctcaatgaaatttatctaggacaaaatggcgatacgcaaattcacggttttgaattagccagccaattctattttggtcgttcgattcgtgaaattagcttagatcaaattgcccttttagtggggatggtcaaaggcccttcactttataatccgtggcgtaatccgcaaaacgcgctcgaacgtcgcaacattgttttaaagctaatgcttgaacataaaatgatcggcgatgaactttatcaattattaagtcagcgacctttaggtgtgcaaaagaaagggcaaatctcgcgtaaatatcctgcatttattcaaactttacaggcggatttacgccgcgaactgggcgaacacaaaatatcaagcttacttggtgcacgtattttttccacaatggatttaaaacaacaagctcaagcagaaaatgcagtggtcaataccgtttcgcaattacaactgaaaatgaaaaatccccatttagagggagcgatgattataacggattatcgcacaggcgaaattcgtgcagtagttggcggtttacaaacgcaatatgcaggctttaatcgtgcattaatggcaaaacgtcagattggttctttagtaaaaccttctatttatttgaccgcactttctaacccagaacagttccgtttgaataccccaattaataaccaaccaataacaattaatgtcaaaggtaacccgccgtggcagccacgcaactatgacaaaaaatatagtgattcagtaatgttaatggatgccttagcccgttctttaaatattcccactgtaaatattggtatgaaagttggcttgagcaaagtcattgacacgcaaaaagcgatgggctgggacaacgtggaaattcctaaagtgcctgcgatgttgctcggttcttataccatctcgccttatgatgtcacaaaactttatcaaacccttgccaatcaaggtgggagaattgcgcttacaaccgtcgatagtattgcagatcgtcaaggtaacctaatttttcaacacgataaaagtgcaaaacaagtggtgccacaagaagcggcattccaaaccttatttgcaatgcaacaaactgttgaacgtggtacagctcgcagtttgcaaaaggattacgctgatttacatttagcaggcaaaacaggcacaaccaatgaatcacgcgatacgtggtttgtgggaattgacggaaaaaatatcagcaccgtctggcttggtcgcgatgataatggcgaaacaaaactgactggtgcttctggcgcattgcaaatttataaagattatttaaaccgtacaaatattgaaaaattaacaattactccccctacaacagtgaaatgggtggggataaatcaatacggtgactgggattgtgagagttatcgaacaattcctgtttggctaaataatggtcagaatttctgtggcgaaacatcatctccctctctcacgccaacaactgaaacagaaacaccaccacaagaaagcctgtgggacgtattggataatcccaatccacccgctcaataattaagccgtaggatttactaaatttccaataataaacattttcccctatacttcccctaacatttcagagggtttttatttctttttaaaaatagcaaacgtttgctttatttgatttaaaagtgcggtacaatacgcaccagtttttactttcatacaggtgcaaaacaatgacacaacaactccccattttaagtctaaaaaaaatctattcaggcaaagtacgcgatctctatgaaatcgatgataaacgtatgttaatggttgcttctgaccgcttatctgcctttgatgttattttagatgatcccattccacgaaaaggcgaaatcctaactcaaatttccaatttttggtttaataaacttgctcacattatgcccaatcatttcactggcgacagcgtttatgatgtgctaccaaaagaagaagcggatttaatcagagatcgcgccgtcgtgtgtaaacgtttgaatcccattaaaattgaatctatcgtacgtggttatttaactggcagtggtttaaaagattacaaacaaactggcacgatttgcggattaaaattgcctgaaggcttggtggaagcgagtaaattacccgaagctattttcacgccatcaagcaaagaagaagttggcaaccacgatataaatatcagctatgcagaatgcgaaaaacttatcggggctgatttagccgcacaagtaaaagaaaaagctatcgcactttataccgaagcttcagaatatgcactcactaaagggattattatttgcgacacaaaatttgaatttggtttagatgaaaatggcacgctcactttaatggacgaagtattaacgccagactctagccgtttttggtctgtggatacttaccaagcaggaacaaatcccccatcattcgataaacaatttgtgcgcgattggttagaaaatagcggctggaataaacaagctcccgcaccaaaagtgccagaaaatattattcagaaaaccgttgataaatatcaagaagcactggatttattaacaaaatgaaaattaggattttttatgcacaaagctaaataaagatttttgcttttaatgtacaaaacactagacaaagaggaaaagtgcggttatactttatcgaatttttattcacaaaaatcgattatttattcaattctaattattagtaaggaaaatatatgtcaaatactattctacagaatttacctaaaggacaaaaagtagggatcgctttctctggtggtttagacactagcgcagcattactttggatgcgtcaaaaaggcgcagtgccttatgcctacaccgctaatttagggcaacccgatgaagatgattacaatgcaatccctaaaaaagccatggcgtatggtgcagaaaacgcgcgattaattgattgtcgtgctcagcttgctcatgaaggcattgccgcaattcaatgtggtgcattccatatttctacaggcggcattccttacttcaatacaacgcctcttggtcgcgcagtaacaggcacaatgctcgttgcagcaatgaaagaagatgatgtaaacatttggggcgacggctcgactttcaaagggaatgatattgaacgtttctatcgttatggtttattaacgaacccgaatttaaaaatctataaaccttggttagatgcacaatttattgaagaacttggcggtcgtttagaaatgtctcaatttcttattgaaaatggttttgactataaaatgtccgttgaaaaagcctattccactgattccaatatgctcggcgcaacccatgaagcaaaagacttagagcaattaagcacaggcatgaaaattgttaaaccaattatgggtgtcgcattttgggatgagaatgtagaaattaaaccagaaacagtcaccgtcacttttgaagaaggtgtccctatcgcattaaatggtaaacgttttgataatgcagttgatattattctggaagccaatcgtatcggtggtcgtcatggtttaggaatgtcagaccaaatcgaaaatcgtattattgaagccaaatctcgtggtatttatgaagcaccagggatggcattattacatatcgcttacgaacgtttagtcacaggtattcacaatgaagataccatcgaacaatatcgtattaatggcattcgcttaggtcgtttgttatatcaaggtcgttggtttgatccgcaagcattaatgttgcgtgaaacagcacaacgttgggtggcaaaagcaattacaggcacagtaacccttgaacttcgtcgtggtaacgacttcacaattttaaataccgaatcgccaaacttaacctacgaagcagagcgtttaagtatggaaaaagtggaagatgcgccatttgatccaattgatcgtatcggtcaattaacaatgcgtaatttagatgtatcagacacccgaggtaaacttggcatctatgcacaaacaggtttattaagcgcaattaaagattccgtattgccacaattaggcaaaaaataaatcataaaataaaatctgcatttcaatgactgatatttaacatcatgaaatgcagatcctttcacaaaaatagtagttagctaaaaaaactagaaatataagaaataatcgtttttccacttaatattgccataataatcacaacaaaccagcctgaaaaagctaaaaaaacagggtgtttataagtgccaacaatatcacttcgataagcggctaacaaaattaatgccaatgcaatcggcagtattaagccatttaatgttcccacaaaaactaataccgcagcaggttttcccactgtgactaaaacaacggtagaaatcacaataaaggcaataatccaacgattacgattgcgttcaatagttggacaaagggtcgttaagaaagaaactgaagtataagccgcaccaataaccgatgtaatagacgctgcccaaataactaccccaaataacacttgaccaaaattgcctgctacatattcaaaaggcgtttcagctggatttttaggattaagagacacaccttttgacaccacgccaagtaccgcaagaaataatacaatacgcatcgttgaagcaattaaaatggctgaaacagaactacggctcacttcagctattgctttttcgccttgaatgccagcatctaataagcgatgcgcgcctgcaaaagtaatataaccacctacggttccccccactaatgtgacaatagcaatgggatcaatttgttctggaataaaggaatgatatgccgcttcagccacaggcggttcagttttaaacattacataaaacgtgagtgcgaccataataaagcccattaattgtgcaaaacgatccattaataagcccgcttctttacgcaaaaaaatcaaaatagcaataataccgctaatcactgcgcctatttctggtgctatgccaaaaatagaatttaaaccaagccccgcaccgccaacattaccaatgttaaaagccagtccgcccatcacaatcagcgcagcaagaaaataccctgctttcggaaaaaccgcattagaaatatcttgcgcgcgtttgccagacacaataacaattcgccaaatattaagttgagcaccaatatctaacaaaattgataataaaataacaaagccaaaactcgctaataaagtattggtaaaggttgcggtttgagttaaaaacccgggcccaatggcggatgtcgccattaagaaagccgcccctaaaaccgcatttcgtctgtgagtaattgatgccataaagcacctccattgttaagttgatgttatgtgtttattcggcttatgccgttattttgatatgatttttttctaattcttccacaatgcgtttagcaaattgcaaagaatgttgattatcgccgtgtaagcaaatactttctgcttttacaggcacgaggcttccatcaatggcattgacttgcccctttgttaccatttgtaacacttgttgaatagcttccttatcagattttaccattgcatttggttgagaacgaggcactaaactcccatcaggcatataatgtcgatcggcaaacacttcagaaatagtttgcaacccttcttcctctgcgatacgcaacattaaactacccgctaaccccattaatttcaaattcggatcaaattgataaacagtttgtgcaattacacgcgctattttttcatcttttgccgcttggttatataacgcaccgtgaggcttaacataactaattaccgccccctcgccatcacaaattgcttttaatgcacctaattgataacgcaaatgtgcgattaattcctgtgaagacaacgccattgctgtacgaccaaagttttcgcgatcaggaaaactagggtgtgcgccaatacgcacctgattttctttcgcaaatttgaccgcactttgcatttcctttgcacccccagcgtgtaagccacaggcaatatttgcagaagaaagcaactgcaacaaactttcatcaaaaggaaaaccctctgcaatatctgcatttaaatcaatttttttcatcaacaattctcctaatttgatcaaggtatatttcatttttacggcgtaatttagcagcctcttgtaagctaaccgcttcaaatttaatcgttgaacctaaacgcacctgtgccaaagccccaagatcggcatcaatcacattagcaattttaggataaccgcctgtggtttgtgcatccgccatcaaaataataggctgaccacttggtggaacttgcacactaccaaactgaatggcgtgagatagcatttccaacggctgctttaattctaatttctgaccttgaaaacgataccccatacgatcactattactttgcaacgtccattcatttcgccaccaataatactgggattttcgtttaaacgcctgatattcagaagatggcaaagcacgaataacatcgctaagcggaatcggcgcaacaccaatttcgctacgcaaaatatgatcatttgccgtttgtagctgatcgcctgtctgcaaacaacgtccctcaatgccccctattttcgctctcaaatccgtactacaagaattcaatgcttgaggcaaaacaaaaccgccttgaacacataaataaccatacattccaatttttgcacgggtcatttttaatatttgaccggcacgtgcttgataacgccaataagcaaaaacaggcttatcatctaacgtcatttcataaaaagcaccagtcacacaaaaattcatatcttgctgaaattgcaatgtaatgccacctaaaggcacttcaatggcaggaacgttctctgcattgcccaataaaatattgcctgcacgtaaggctaatttatccattgccccacaatggctaataccaaatcggcgtaaaccaaaacgtcctaaatcttgaatagtcgcgcgggattgcacatcaagcacatcaatcatagttcaatcccctccacaataaatttcacagtatcgccagcttgtaataaggttggttgtgcttgatttttatcaaaaagtgcttccttagtataaccgatcaactgccacccacctggcgaagcaaaaggataaatccccgtttgcgcgcccccaataccaacagaaccagcaggaacaaccgttcttggcgtggcacggcgtggcgtgtgtaaattttcaggtaaaccacccaaataaggaaagcccgcttggaaaccaatcatatacacagtataaataggctcactgtgcatctgaataatccgctctggtgttgtctgatgaaatttcgctacatcagataaatcctggcctcgctctcccccataaataacaggaatttcaatatggcgtccttgaaaatccgatactttcaattcagcccaaagttgttctaaacgttgcacaagcggcttaaaatctacgaaaaaatcggtaaaaaccgtaagattattcattcccaagacaacttctacaatatcttgttctgattgcaattgacgagcgaacgcccataattggcgttgttgttgaatggaagctgggggtggcaaagagcaaaccaccgccgactcactgatcggaacgatattcataatataccctttatatgatgttatgtaatttgttatttttttgttacagatctcttttaaaggatatttataggttttgtcaagtctttattttcatcttttaattcaatttaaaaacaccgcactttaaccatcaaaaggaaatttagcacaaattcatttggttgaaacgatacataatagccacccataaaaaaagcggcaaatgccgctttttaagagagataatccaaactttaccactggtaaccaacacctgctgcaacgcctgttttaccttgactattggttgtgcctgacaagcgaataatcactttgccattatcggaaattcttgataccccgatagctaaaccattttgaccttgataactacttcccgcaatagcaaccattgatttacctggcatagtggcttgtggtaactgtgaagccgctaatgcacttgctgtacctgcatctgcacgtttgcccactttattcactttgccctcaagattattcacttgtccagcaaggtttgttaccccttttgccacggcatacaactgacttccgttaatcgcatcggtggaagtggcagaaatttcgccattagccacattgtcaatgaccacgcctttgccgttcgattgattgttcggatcaaggcggacaacgtgtttttcatcggtagaaactttatcattgctcacttcgcctttggttttatccgcagcaccgtcagcattggtgtaataccacttatccgcaccattttcggttactttcacaactttcttaccgtttgcatccacgttaccaagtgtcacttctttgttactcgccgtaccatcagcattcagttcataccattttccgtcagcttttttaacgatcttattaccgtttgcatcggtattgtagatttgcgttaaaggcaattccacatcggttttcacaaaggttgtggtcactttatcgccgtttgcatcagtgctttccaccgttgccgcgctcactttggtatttaaaccattagcaaaacggactttatcgtgggcatttacagtttccgctttatctttagacaattgcttgtcttttgcgctttctgcaaaggctttttcagcttctgccgcatcagccaaaccaagctcaaagcctgatttcgcaatcgcatcagccacttggttacctgttacatagccggaacctttgttggttagggtaacttcggtcttgctgccgttagcagaaacgactttgccgttttcaaccttatatttttcagttttacctgtcatcggtttactggttgccgggtcaatatcctctttgctgtaatacatatcgccaactttaaccaagttcgtttccgaaccatcggcattcttaacggtaaattcattcgatttaaccacttcgcctttagccaattcaaaggtaatcacgcgcgtaccgttcaatgttttaccggaaacattgataccgttgccgctcttgaatttcacttcattggcgttacgcacttgcgcgttgtattcctgattgggttcgcctgtggttttgtccgcagaaatgacccagcccaagccgcgcaaatcgcccacggttgcagcggtattgtcggcaacagtcggattattatccgcgcctttttcatccaaattggtcaagtctttataggcattgtcataatgcttttcaaaatcagcaacagtgccatttgccaacgtatgaccatcaccaaatttcttcagtccgctcacaacgtttgtaactgctttattacccgcgctaatgccatctttggttacgctaatggtgtttgcagtgtttgcacctgccgcacccgcaccgtttgccggcgtaatggtcaagccgtctttggtaatcttggtgctttcactgcctgtaccgccgtttgcgtctttgaactctacgctggtcaggtctttcagctcttttttcagcgagtaggtaaagtctttgccgctttgtttgattttcaggttgtcgccggctttaaaggttactttgtcgcccgctttgacttcttgccctgctgaatttgcaggatcaacttcaccagtgccttctttaccagcagttgccgtccagcttaatttatttaacgcatccgctaaaccacttgcatcaacaaatttcttaccatcgccattattcggagctgtaactttaccatctgccacagtaagtacggtcgtgtctgcaacgattttatcgccgtctagttttaagccatcagccactttaacattgtatttaacagtaatactaccgtcgtttgctttagttacttcggcagttgtgccattaccatcagcaaaggttacatttgtgcctgacgcaacagttgcgaagtcatcattctgaccattagcacctgttgttttaactctccaaccagccttattcacggcatcaatcacagcttttgcagtcactaaaccattaccctcgtctttgccgtcggtttcggtaacagttacgccattattgttagcatccttcagctctttgcctgtaaacagtttgccgttgtggtctttgataacagaagtcttcgcaccgattttaacttcggttctcttgccattatctttactttcaacagttacactcgtggtgtctttatctccactaacaaagtccactgtgtcgtaggttgctacaaagtcgatattctccacttgattatttgcagatgccggtttaacaccacgaacattccaacccgcattcaagacatctttaacgctcgccgcgcgttttttctcgttatcagtaataccattaccacctaaattggttgtcgcaccactatttaacaatgtatcagttaaagttgaagcaatgccatttaagtgaatattagcatcatcgcctgtcttactatctttagcgaagttcaagcctttggtgtcgcttgtgatattgactttattgccgtttgtaccaagcgataatttatcgctaacggttgcgctttttacactaaggtcgttcgcaagggcaaaagtaatatttttaccatcacgtttaacttttaagtttttacccgcttttaaggtcaaggtgtcgcctgctttgagagcatcatttgcgccatcatctgttgggctatcatcaatcgtagcactgtcgtcattttccactttcacgaaagttgctgcgtcgttaatcgctttagcaacgtcgccaacagttgccacttttttcttgtcagtttcggtagcagttgcaccatttgaacccttgacaaccactttaccgcgctcattggcatttgtgccttgggctgtagttgcatctgttgttacggcattaaactcgcccttggcaacggatgcaccttttgttgcatcaacggttaatagattattcccatctgtattatctactttgagtttaatcttgccgtcagtatctttttcaagaccatcaccaactttggcttctgcaacatcaatcgttacagtatgttttccgttgttatcagtttttgcagacacggttgcaccgtttttacccacgaactcaacttcatttgcgtttttaacggcggcgtggaactctttatcttgtgtttcatctgcagttttcttagctgaaagcacccagcccaaaccacgcaagtcgcctacggttgcagctgtggtatcgggagcttttgcatctgcaccatttccagctgcacctgtcgcaggtttagttaaatcaaccaagtcttgtttggctacttcagctgtattagccgcaggttgagttgcacctgcagtgttttgagtatctttataggtttttaaagcactcttaacattggtaatttctttattacccgcactaatgccgtctttggttacactgatggtgtttccgttagacgcatctgtgcctgccgcagcaccatttgccagcgtgatggttaagccgtctttgttgatgacggttcccgtatcatttctgccattagctgtaccacctaaagtaatgctcgttaagcctgttaaagtgtcttgcagtgaataagtaaagtctttttcagactgtttcacttttaagttcttgcctgctttaaaggttactttgtcgcctgctttgacttcttggtcggtttcgccctctgactcgccatctgcatatttatcggcttttgccgtccagcttaggttgtttaaagcagtcgctaaaccctctgcattaacaagtttcttattgttattaacactattagcaccagcaggaacagacaccttaccacctgttacagtaagtgtggtcgtgtctgcaacgatttttttgtcatcgccaatcttcaagccgtcaccaacatttacatcgtatttgacattgatgttgccattatctttgcttacggtcgctgtggtcgcattgccgtttttgaagttcacgctcgtgcctgatgtaacggtttcagcgttacccgcattcacggcggttgcaccggtttcggcagtcgcgccctcaccggttaccctccaaccgcttttatttactgcatcaatcacagtttttgcagtaactaagcctgtgccggtgtctttgccatcatcttcactaacggttgcaccattattcgcatctttcaggtctttgcctgtaaacagtttgccgttgtggtctttgataacagaagttttcgcaccgattttaacgtcagcacctttgccatctgctttttgggttacggttaccgttgttgtacctgtgctgtcatcggtaaagtttactgtgtcatacgtcgctacataatcaacattattaccattaccttgaatattccaacctgcgcgcaatacatcttcaatacttgctgcattggattttttcgtcgcatccacatttaaatcaacgtgtgaagacttcgctcccgcgcttggctcagttaaagttgtcgcaatacctttcaaataaacattcttagaacccgaggcatcggctgtttcttttgcaaaattcaaaccatcagccgtgctagtaatattcacttttggcgtcgcagtagtgccacctgtaggtgtattcccgccaatcgttaaagtatcactcactttcgcagttttcacctcaaggtttttcgccaagtcaaaagtaatattttttccatcacgtttaactttcaggtttttacctgctttaaaggttaaggtatcgcccgctttaagtgcgtcatctttgccgttatctgtaggattatcttcatcaatagaggtagttaaattctctgttttcacaaaagtcgccgcactattaattgcggttgcaacatcttttacagttgcgactttcttatcagcgtcattagcagtagcatcttttacagttactttaccgcgatctgcatcagtcgctccagttttaacagtttcaaagccacctttagtgacagcagtaccattattaccaacagttaaaacattatcagtgttttgattatccactttgagcttaatagtatcgccatctttttcaagaccgctatccgctttagtttcagccacactaacggtaatcgtatgtttaccgttttcagatttggaagtaaccgtagcagcaccggctccggtaaagaggacttcatcagcttgtttaacttgattgctttcttctttcgtaccgtttttggttgatactacccaacccaatttacgtaaatcgcctacagtcgccgccgtgctgtcagtcaccaacggttgtttatttgcatttttttcatttagatttaataaacctttataagcatcttcaacgtgtctatttaaatcagttgcagagttatttaaaacatcaaaattcgcatcgtcataagctcttaaaccactcgcaacattagtaatagctttattacctgctttaatgccatctttggttacgctgatggtgtttgtacctgtcgtaccgccattacctgctggcgtgatggttaaaccgtctttgttgatgacggttttcgcatcatttccgccattagttgtaccacctaaagtaatgctcgttaaacccgttaaagcatcttgcagtgaataagtaaagttcgcaccatcctgtttcacttttaagttcttgcccgctttaaaggttaccgtttcgcctgctttgacttcttggtcttttgaaatcccctcaagcgcaccatcagtatcagcctcagcttttgctttccaacttagattacctaaagctgttaccaaatcgcctgcattaacaagttttttcttgtcatcttctttagcaatttcagctaccttaccacctgtcacagtaagtgcggtcgtatctgcaacgatttttttatcgctatcaaatttcaagccgtcgccaactttcgcgtcgtacttaacagtgatgccattgccgttagtatctttagttactgacgctgttgtaccatcgccactttcaaaggttacatttgtgcctgacgcaacagttgcgaagtcgccattttgaccattagcagtagttgttttaactctccaaccagccttgttcacagcatcaatcacagcttttgcagtgactaagccattaccctcatctgtattatcagtcgccgtgttacttgtaactttatttgtgtcgttattctcttttccagtaaataacttaccgtctttttctttgataacagaggttttcggtgtgaatttcacttcggttgttttaccgttttctttagctgttaatacaacatcaagcgtgtttttatcgcctgtaataaattcaacattattataagcggacactaaatcaacactctcaacattacctccagcagttttagcacctttaatgttccaacctgcatttaaaacatctttaacagttgcagctcttgttttttcaacatcattaggtgtaaaacttgatgaacttaacacacctgtattcgttaccgcatcaggcaaagttgaatccaaaccattcaaatgaacatttccgttacctgttttcgccaatttcaagccatttgcatcactggtaatatcaactttatcgccgtttgcgccaaacgataatttttcagttgcaacactggtcagatctgtgaggtcttttttcagcgagtaggtgaagctactggcattggtgctttcatcggtgttttgtttgattttcaggttgtcgccggctttgagggtgattgctccggcttttagtactcctttattgtcgaaatatattccccaatttgaattttctgtaacttctttttctcccgtgccttctttatcggaatggaagctcaacacgggagcagtgcgtactacggggtctaactcttcatcttcatcggtagcattcgcctgaaccgttgcaaacaacagtgtcgccaatacggcggtctccacggttgcggaggcgcgtttggtgtgggtgcgagtgagttcagatacgacaacccaagtttgagtcataacattccaaataacgttaaaaattttgttcatttttatttaccttatatttaataaaattaatgataaatatacttttcttagtgaaatcgtgcgtattctattctatatttggagaataaaaaagtgatattttgcgaaaagtttagcctcaaaaaaaaaaaaaaaaaaaaaaaaaaaataagaaaaacaaatacttacacaaaaatcaaatcttttcagataagttaatttattttttatttaaaataaggtttaggtttatttatcttttatttctttttagcaagaaaaaagattaatcatgactcattttaggtgttttttgttgaaaagtgcggtaaaaattaaaagaaaaacctgctttctggcattgaaagcaggttttaggcaaaagggaacggcaatttattgaacgatttcgccgacaatgctgcgtgtggtttctttcacttctgtgagtttcacttttaccatgtcgccgattttataagtgcggtcgccttttatgtaaagagcgagttcatcaggatttagttgtatttcttctttgttgttgtgcaaggtggcagcaggaatgaatagcgatgcgccattttcgagcagttgcacgcgtaagcctgcccgcattacatcttgcacttctgcattaaattccacattttcagccactttcggcgaaagatagcggcaatatagccaatcggcaatatcacgttcgacgaggcgattttggcgacgggcttcttgcaaacgtgccaaaacttcattttgtggtttttcgcaaggctgttttgccagcacggctttgattaagcgatgattaaccatgtcagaatatttacgaattggggatgtccaagtggcatagccctctagccccagcccgaagtgcggtgctaattctgatttaaattcggagaaggttaaataacggcgtaggcgtagggctacataatcactttctagatggtcgatgtcgtgacgcatttggcaatagccgtttaatgttgctaagttttctactgaataacgttctgccagttctgcttgattttgttcattggttaaatttgccattaagaaatggtgtgcattttctaagtattttttatcaaaaccgctgtgggtgttgaaaatgcctgtttttgcgttttcgtctaagaattgggcggcgcagatgttggcgataatcattgcttcttccacaatttgattagcaatgcggcgatattccgctttgatttcttgcactttgccgttttctgccagcacaaaggcgtaatcaggtttttctttaaagagtaaggaatgggttttacgccattgtatgcgtgctttggtaaattgatgtaaccaatgaatttgttgtgcaatttctggcgtttctggctgccacgcgttttgggtttggtctaagtagtctgagacgttgttgtaaaccagtttggctttagattgcacataagcggaaacaaaatgcggtttggctgtgatgttgcctgcaagatcggtttcgatataacaaaccagtgcagggcgggtttcattggcgattaaggaacataattcatcggataattcacggggtaacattggaatgttaaagcccggcaaataatttgtgaagcaacgctgttttgcttcttgttcaatttgacaatctagggcgatgtaagcggtgggatcggcaatggcgaccacgagtttccagcctgtttgttcgttgttttgtgtgatgggttcgatatataaggcatcgtccatatccattgtgctttcggaatcaatggttacaaaatgaagtgcggtcagattttcacgtgttttttgatctaacatttcataatgttctgcgccttgcacgggatagcgcgattgttcgtggcgtgccaatgtgacccaccaaggggcaagttcgtcctcggcacggcaaataaattgattaattgtggcgtagaaaaagcgatcgtcacgcaatggatgggtttttaaatgtgcgacgacccagtcgccctcttgcagtgcttcttttaccgatttcgcctgttgcgcgccaatgggctgattaatgcttgggtgatccaccagcacttgtaatttgttgtctttattgaaccgcacttttgcgataaaacgtgtgagcattggctcaattaaggcttctggctcggcttgttctttgtcgccttgtttttcaatggtggctttgattttgtcgccgtgcatcacttttttcattgatggcggtgcgatgaaatagttttttttatcgcactctaaaaagccgtaggctttatctgtgctttttaccacgccctcaacctgttctttgctgtcgtggatttgttgtttaagttgtgcgagtagaggattatcttgaaacatagttattttgaaacatagttatattttaaaaaagcgaaaaggcagactgaaagcctgcctaaaaagaatggaagaaaatttattcttcgcctaattcgcccattgccgtaatgctgaaacctgcatcaacgtgaacgatttcgcctgtaatgccagaggctaagtcagaacataaaaatgccgctgagttacccacatcttcgatagtcacagtgcgacgtaatgcagcggttttctcaaaggtggaaagcatttttttgaagtttttaatgcctgatgccgctaaagtgcggattgggcctgctgaaatagcgtttacgcgaatgccctctttgcctagatctgctgccattacgcgtgttgcggcttcaagagaggcttttgcgaggcacattacgttgtaattaggaattgcacgttctgcacctaagtaagaaagggttaataatgctgaatttgggtttaaataagggcgtgccgcttgtgccattgcgacgaagctgtatgcactgatgtcgtgtgcgatgcggtagccctcacgggttgcggcattgacgtaatcgccgtctagttgatcgcccggtgcaaatgcgattgcgtgaacaaaaccatcaaatttttcccagcgtttgcttaattctgcaaagcaagtttgaatgctttcatcagttgcaacatctaaaggaagcacgatgtcagagccaaattctttggcaaattcttctacacgtggttgtaatttatcgtttaaataagtgaaagcaagttctgcaccttgttctttcattgattttgcgatcccgtaagcgatggaacgattgcttgcaagacctgtgactaaaatgcgtttacctgttaagaaacccataatttttcctatgttgttagcgtaaaaaacttgcgtagtataagcgaaaatttgtttttatacaaagccgaccaatttttannnnncattccattcattaattaattaatgaatgaatgnnnnnagccgaccaatttttaaattaaacgcgtgggcttacgcccaccctacaatggaaatgttatgataaccattaaattttccttaaatttgtaaaattgcaaaaccgtaaaattgtaaaattgtagggtgggcgtaagcccacgcggtgttccattataaatttgtaaaattgtagggttctatataaggtgtttttgcaaaacacgctattttcaaggataatacaccgattttttaatacaatttgaatgaataagagaagattatggcttatcctcaagaagtgaataaacgtcgcacttttgcgattatttcccaccctgatgcgggtaaaacaacgattactgaaaaagtacttttatacggcaatgcaattcaaaccgctggctcggtcaagggcaaaggctcggcggctcacgcaaaatctgactggatggaaatggaaaaacaacgtggaatttcgattaccacttctgtgatgcaatttccttataatgattgtttagtgaatttgctcgatacccccggacacgaagatttctctgaagatacttaccgcactttaaccgctgtggatagctgtttgatggttattgactctgccaaaggggtggaggaacgtacgattaagttgatggaagtcacacgtttacgtgatacgccaattatcacgtttatgaataaactcgaccgtgatattcgtgatccgatggaattgttggacgaggtggaaaatgtgttgaaaattcgttgtgcgccaattacttggccaattggctgtgggaaattgtttaagggtgtttatcatcttgcaaaagatgaaacctatctttatcaatctggtcaaggctcaactattcaagaagttcgtgttgttaaaggtttaaatagccctgaattagatgccgcggttggcgatgatttagcacaacagcttcgtgacgaattggaattggtgcaaggcgcaagtaatgaatttgagcaagatgcctttattaaaggggaacttacaccagtatttttcgggacggcattaggcaattttggagtggatcattttcttgatggcttaacgcaatgggctccgaagccgcaatctcgtcaagcggatacaagaacggtggaaagtgcggaagaaaaattcagtggttttgtgtttaaaattcaagccaatatggatccgaaacaccgtgacagagtggcgtttatgcgtgttgtttcgggcaaatacgaaaaagggatgaaacttaaacacgtccgtattggaaaagatgtggttatttctgatgcgctgacttttatggcgggcgatcgcgctcacgctgaagaagcttacgcaggcgatattattggtttgcataatcacggtaccattcaaattggcgatactttcacgcaaggcgaaatgctgaaatttacaggcattccaaactttgcgccagagttattccgtcgtattcgtttgaaagatcctcttaaacaaaaacaactgttaaaaggcttggtgcaactttctgaagaaggtgcagtgcaagtgtttcgtccattattaaacaacgatttaattgtgggtgctgtgggtgtgttgcagtttgatgtggtggtttctcgtctaaaaactgaatataacgtggaagcaatttatgaaaatgtgaacgtttccacggctcgttgggtagaatgcaccgatgggaaaaaatttgaagaatttaaacgtaaaaacgagcaaaatctagccttagatggcggcgataatttaacctatattgcgccaacaatggtaaatctaaatttagcccaagaacgttatcccgatgtagcgttttataaaacgcgggagcattaaaataacaaagtgcggtaaaattctaccgcacttttccagaaaaaaagcgttgaaatttaattcaacgcttttcttttatttagagaggttttcttgttttaatcgccaaagttgataaatatttaccacaactaaaaacgcatttaatactgcaacgggatatgctgtgataattaagctgtaaataacaaataaaatcgcgccgatactatttacaatgcgtaaatgcacaatagatttaaataagaaagatgcagcaacaaaaaaagtcgccatataacctaaaaactcaataaaattaaagtccattatgttgttctctttgattaaaaataaaaacggtgggtatgataaaagatttttaacgcaaggaaaagataagaaaaagaagcaaccgtttgcaagggaaaattatataaaaataagttgaacgagagccatatagaaaagtgtgcctacggcaatagatagaaacatatttttcttccagaaatgtaagccaagcacgactatccctgcaagcaaatcaggaatgccgtgatagccagttaaaatctcaatatttttatagcaataaacgacaagcattccaaacattgcaggaggtaaaacttttccaagataacggatatattgtggaatggggcgattaacaggaaatacaaaaaatggtaataaacgtgtaaattgtaccgccactatacaaattccgatggtaatgatttgttctgttaatgtcattttaaagattccaattttgtttctaatttagttatgcgcatagttagaattaaccaaatgccaattaatgttggaattaaaaaatattcttttcctataataagtaaaaaaactaatgcgatacctaaacctaatagagagctttcgtgggatttttcttttaaccaattttctgcaaaaataactaagaatagtgctgtcattgaaaattccacaccttttaaattaaaaggtaaaacagtaccaaataaattccccattgctgcgccaagtacccaataaatatgcaaatataagctcacaaaaaacatataccagcctttatctaagtgcggtgggatttttgccatataatttagggaaaaagattcatctacaagtgttgtgattaaataccagcgtttttttcctatatgtatgccatatttttctagcattgatatgccataaaaaatttggcgggcactaatcattaaggtaattaataatacgctgattggagaaaaaggtgcaataagtgcgcctgctgcaataaattcaacagaacccgcataaataagtaaagccatcaaagtaggatataaaaatccgaaaccaagtgctttcatataaataccgtatgctatgccaagaaataaaaatcctgcaatcattggtacgctgtagggaaaagcagccttagccgcttcagtaattgggttagagtgttgattttgttgagataaattcattaattatgtctataaatttaaaacagaaagtccgggtaaagttgagaaactttgagatttgactgtttgataaaaatcttctaaataagaaagggattcatcttctttgcgaatcgccgcatatagattgctatataaaccttcttttgtgacttttcttgccacaacataacccttttccaaataaggcagcgcagcccaataagggatagtcgcaataccacgacgactcgcaacaagttgaatcattgcaatagtaagttctgttgtacggcgagtaggattaatgccttttgatttaagcactttacgccatagatctaacatatcgtcaggtacggggtaagttacccaagtttcatcaataaaatcttccgcttcccaaatatctttttctgctaaagaatgattttttgagcaaatcccaaccatttcataagaaaagagcggtttaaaaatgacatcatcattatgctctatttctgatactatcgcccaatctgctcgatgggaaagtaataaaccaacgggatcagtatgaaagccagatacaatatccagttctactagcccccaatgctgacggaattcatccatcgctggcattaaccaatcaaaacaagtatggcattccaccgctatacgtaactgtcctgcatcgccgtgttttacccgtgcaagatcacgttcagcatcaatcactttaggtattacttcattcgcaagacgaattaaacgctctcccgctgaagtaaaacgaagtggattacttttacgctcaaataaaggcaagccaaattgttcttctattaatttaatttggtgagaaagtgctgattgggttagatatacgcgctttgcagctagagaaacgctgcctgtctcttttaaagccaataaagttttaagatgtctaaattctagaaaggttggtttcattaataatattcatataaaattaagaattagggaaccagtataatacattaaaattagaaatatgctaattaataaaattaattatttagataattattttagttaaaatacaaaaccccagtccttaaactggggttctatatttattctttatctaatttgtttaattctgtttttacttaatttaattttatctatcttagatagatttatatttagatttgtatctgataacctggcggtgccctactctcacatggggaaaccccacactaccatcggcattacagcgtttcacttctgagttcggtatggtctcaggtgggtccaccgcactatcgccgccaggataattctttgataactcgtcttttctcttttatctctcgtctcttttatctctcgttactcagtctttcctctacctttcactcgttcttattggtcacaagctgaactcaattttctttctattaagtcttctatacttacttttctttgtttagtcttttacttcggtttccgctctacttttatttgcttcgcttttcatctcttacttcacttagctcccaaaaacacttgagcgttgtatagttaagcctctcgggcaattagtatctgttagctcaatgtatcactacacttacacaccagacctatctacgtcgtagtctacaacaacccttactgacttaaagtcagggatgactcatctcttggcaagtttcgtgcttagatgctttcagcacttatctcttccgcatttagctacccagcaatgcctctggcgagacaactggaacaccagtgatgcgtccactccggtcctctcgtactaggagcagccccaatcaatcatccaacgcccacggcagatagggaccgaactgtctcacgacgttctaaacccagctcgcgtaccactttaaatggcgaacagccatacccttgggacctacttcagcccccaggatgtgatgagccgacatcgaggtgccaaacaccgccgtcgatatgaactcttgggcggtatcagcctgtnnnnncattccattcattaattaattaatgaatgaatgnnnnntggggctcccactggcttgtacgtacaaggtttcaggttctatttcactcccctcaccggggttcttttcgcctttccttcacagtactggttcactatcggtcaatcaggagtatttagccttggaggatgggccccccttcttcaaacaggatatcacgtgtcccgccctacttctcgttagcttagtaccacaatatggtttttagatacgggattatcaccctctttgattgtgcttcccaacacattctcctcactatactgctatcacttactggctctttcgctttcgctcgccgctactgacgaaatctcggttgatttcttttcctcggggtacttagatgtttcagttctcccggtttgcctcaacaagctatgaattcacttgttgatagtagattcttcatctactgggtttccccattcggatatcttggattaaacgcctcttatcgactcatccaagcttttcgcagattagcacgtccttcttcgcctctgattgccaaggcatccaccttgtacgcttagtcacttaactatacaacctcaaatgttttcaatcactttacgttttcacttcaaagtgcggtcaatttgatgcgtattttcattcaactaaacacttgattgcttttgttcaatcaagattttatgcaaaacaggttttgtttttagagtttccttttcagttctctctttcactttcctgtcttgcctactcagactttctctcgaaaatctcttgttttcagcttgtttccaattttttaaagaacagttgataaaacttttcagttatcatcgttaaataaactaaaacagaattaaaattaaaattaaaattaaaattaaaattaaatttaaacttaaaactaagaataaaataacccaatatttaaaatagcttaatcactaccttaatactttattaatttgtctttttctaatttacttaacgatgataagtggtggagataagcgggatcgaaccgctgacctcctgcgtgcaaggcaggcgctctcccagctgagctatatccccatttcatcataatttaataactaatcatttatgtcttagttattagttatttacactacacctttcgtttcactcactctcagagtggtgggtctgagtggacttgaaccaccgacctcacccttatcaggggtgcgctctaaccacctgagctacagacccaagggtaatgttttcttctgctcatttgtctacaactatcagccaatctgtgtgagcactcgctgtctctcgtcttcagtaaggaggtgatccaaccgcaggttcccctacggttaccttgttacgacttcaccccagtcatgaatcataccgtggtaaacgccctccaaaaggttaagctatctacttctggtacaacccactcccatggtgtgacgggcggtgtgtacaaggcccgggaacgtattcaccgcgacattctgattcgcgattactagcgattccgacttcatggagtcgagttgcagactccaatccggacttagacgtactttatgagattcgctccacctcgcagcttcgcttccctctgtatacgccattgtagcacgtgtgtagccctactcgtaagggccatgatgacttgacgtcatccccaccttcctccagtttatcactggcagtctcctttgagttcccgaccaagtcgctggcaacaaaggataagggttgcgctcgttgcgggacttaacccaacatttcacaacacgagctgacgacagccatgcagcacctgtctctaagttcccgaaggcacaagctcatctctgagctcttcttaggatgtcaagagtaggtaaggttcttcgcgttgcatcgaattaaaccacatgctccaccgcttgtgcgggcccccgtcaattcatttgagttttaaccttgcggccgtactccccaggcggtcgatttatcacgttagctacgggcgccagagttaaaccccaacccccaaatcgacagcgtttacagcgtggactaccagggtatctaatcctgtttgctccccacgctttcgcacatgagcgtcagtacattcccaaggggctgccttcgccttcggtattcctccacatctctacgcatttcaccgctacacgtggaattctacccctccctaaagtactctannnnncattccattcattaattaattaatgaatgaatgnnnnncttttttgaaatgtcgagcatattttcacaccttgacgacctgctgcccctaaagcataaacaaatgctcgacctaacattgttgcatctgcccctaatgccaacatacggactatgtctaaaccattgcgaatacctgaatcggcaataattttaatatcccctttcactgcatcggcaatcggtggcaacgctcttgcacttgaaagcacgccatctaactgacggccaccgtgatttgaaacgacaattccatcagcaccgaaacgcaccgcatctttcgcatcttctgggtcgagaatgcctttaatgaccattggaccttcccaaaactcacggatccactctaaatctttccacgaaattgatggatcaaagttttctgttagccagccaatatagtcatctaaacctatttgtctacccatataagttgaaacattacccaaggtgtgcggtttgcctttgatacccacatcatacgcccagaatgggtgcgtaaagccttgcaatacacgacgaatttctttgtaaggcccgctcatacctgagtgcatatcacgataacgcgcacctggagtaggcatatcgaccgtaaacactaaagtagaacagcctgccgccttagcacgctcaagcgcgtttttcataaaaccacgatcttttaacacataaagctgaaaccacattggacgcttaatcgcaggggcgacttcttcaattggacaaattgatactgttgaaagagtaaacggcacacctttattatctgccgcttgtgctgcttgtacttctccacgacgcgcatacattccgcacgccccaactggtgcaagaatagttggcattgaaagtttttcaccaaataattctatactagtatccaattcagacatatcttttaagacacgttgtcttaaagcaatattttccaaatcactcacattacgcgcaagtgtttgctcggcataagaaccgccatcggcatagtggaacataaagggaggaacacggcgacgcgccgcttcacgataatcgctagctgatgaaataatcatttttacctcttattcaataaaatagtgagaaacctgagaggcattataacactattttaacaaattcaataaaaatcataattattttgagaactagatcacaatttattttaaaaaagtgacatatagaaatgatataagtagaaaaatcacctataaaattaggaaaaattgtgaatttatcaatatcacacaattaatctattaacttttaatctattttgattacttccaaagattcaaatccccatagatgtaaagcttttttaaattgagattcttcgggaaaatgtgcggtgcaaaacatttgattatatttttcattttgcgcttgtagatttttatcatcaagtaaatatttgatccgtttagcaattgctgcgctcggatccataaaatatttaacttgtggcaagcacaactgaatttcatctttgatgagaggaaagtgagtacaacctaaaactaatgtatccaaatctgccatgcctgcccacggagataattcatcttttaagttaattagatcaacggaatgaccacgaattttttgctccgcaatttcgactaattttgtcgttcccagtctctcaacaatacaatcttgcgcaaatttatcaatcaactcatcgacataatgacgctttatagtcccttttgttgccaataaaccaatatgttttgcctttgttatttctgatgcaggtttaatagcgggtacagttccaatgataggaatatcaaaagcagctcgcaacggcggaagcacaacagtactcgctgtattgcaagctatcacgattgcatctaatggataacgttgattaataagctgacacgccgctaaagtgcggtgaataatactttcttcttcgcgttctgaataagggaaaccggcattatcaaaacaatagagataatgccaatttggtaatagttttttggcttcacggtatacgctaaacccacccactccagaatcaaaaaagagcacagttgggcgtttttcttttttattcatttaaaactctttgaaaattgaccgcacttttaagcgttcgagtaaatttctttattattgagccagcgacggattaagctctctgccacatcagggtatttttgaatcaataatttggcataatgttgcaccgttggtatcatttttctatctcgcattaaatttgctactcgcaattcagcaattcccgtttgtttcgttccaagtacttcacctggcccacgaatttctaaatctttttccgaaataacaaatccatcttggctatctcgtagcacctgcaagcgtttttgtgaaactttacctagcggaggtttatacattagtacacaaaaagaagccgtgctgcctcgaccgacgcgccctcgtaactgatgaagctgcgataaacctaaacgttctgcattttcgataatcatcaaactagcattcggaacatcaacacccacttcgatgactgtcgttgccaccaataaatccaattctgcatttttaaaacgcatcatgacatcttgtttttcttggggtttcatgcgcccgtgcactaaaccaatatttaacatcggtaacgctttcgttaaatcttcccaaatcgcttcagctgcttgagcttctaacacctctgattcatcaattaacgtacacacccaataggcttgacgtttttcattaacacaagcgttttttacacgcatcacaatttcagctcgacgttcttcagaaaccactacggttgttatcggcgtacgacctggaggcaattcatcaataattgatgtatccaaatctgcatatacggtcattgccaacgttctcggaatcggtgtggccgtcataattaactgatggggatgaaatcccgctttttcgcctttttcacgcaacattaatcgttgatgcaccccaaaacgatgttgttcatcaataatcactaatgctaagtcggaaaactcgacttcttcttggaataaagcatgcgtccccaccaccatttgcaccgtgccagttttaattttttcaagctctgcttgtcttgattttccttttactttacctgccaaccagccaacttcaataccgaaaggctcaaaccaccgtctaaaattattcgcatgctgttctgcaagaatttctgttggcgccattaaggcgacttgtttgccattatcaattgcagttaaagcagccaatgcggcaaccaatgtttttcccgagcccacatccccttgcactaagcgcatcatcggataatctttgataagatcttgttcaatatcggacactactcgcttttgcgcattagtgggttgaaatggcaaggtggctaaaaatcgctgtttcaaatctgtttgataatgtagcggtaaggcagaaaattgttgcgttcctaaccgcactttttgcatagctaaattatgtgccagaagctcttcaaaaattaatcgttgttgtgcaggatgcttaccttgctctaacatttctaatgaaatatctggcggcggacgatgcaataatcgcaatgcctcttttaagctatattgatgtggattaaattcattaggcaaaatttctgcaatctgaaccttgtcgagtaatgtcaaagcctgatccgttaattttcgtaatgaattttgttttaacccctccgttgtggaataaatcggcgttagggtttcttccaatactatgggcgcattatctcgcacaatttgatattctggatgatgaatttctggcatatggcgaccacgtttcacttcgccaaaagcctttactcgcacacctgcttgaaaactattacgcattcccgcattaaaattgaaaaaacgtaacataattttcgatgtgccgtctgacaaacttaccgataaaatcgggcgacggccaaaagcgacttcacaggtttgtacaattccctctatagtaaaatattgttcagggcgaagattagcgattggcgtaattcgcgtacgatcttcatagcgaataggtaaatgaaagagtaaatcctgcaggttatgaatgccgattttagccagtttattagaaatggcagcccccacaccagaaaggctggtcaaaggcacggcatcgagaagttcaaggctcatagctcattaatattgcgtttgacattaacgacgccagtgatgcctttaatacgatgaacgatattggcaaggtgtttgatatcttttacacaaacctgcaaaatcacaagcaataaattgttctctaattcttccgtccaaatattttggagactgctttcgctcgctgaaattgcggtcattaaactaagcaaggcattctgctcattcaatatttctatttgtaattcagcctcaaaattcaccgcactttgaacgttatcccatttagccaacgattgacgacaagcatttttcaaacttgcacaatgttgatggtgtaccacaactgtatttttttctgtacaacatcccacaataggatcacctagaattggatggcaacattgagcaaattgtgttttacccacttgcattggtgcaatagtgagtatttttgattcaaattcgagattcttagtattagcagattctaacggcacgcccacaaattgatgcgcaatcatggaggctgactgattacctaaaccaatttctcgtaataattcatctaaagaagaaagggctaaagcatctaatacagtgctaatttgttgaatagaaaaatcacctaaattatgcggctgtaatgctacattaagctcaacttcgcctaatttcaccgcatcctcttcacaacgctgtttgagataatggcgaatccgtgttttcgcacgagccgttaccacaaaatttaaccatgcgacttcaggatgtgcatttggatcagtaatgatattgactgtttgccctgattcaagggcttttgaaagtggataaggtttatgctcaacagtcacgccaacacaagtattccccacatctgaatgcacagcataagcgaaatctactgctgttgcgcccattggtaattcaacaattcgaccttttggcgtaaaaacataaatttctttcgggaaaaactctgattttacattctcaataaactcaaacgaattacctacactttgttgaatttcgaccaaactttgcaaccagcgttgtacgcggatttgtgcggttgtactatcgtttttaccattttctttataaacccaatgcgcagtaatgcccatttcagcgacttgttccatatcctcagtatggatatgaacttctacgggaactcctttcggcccaatcattgaagtttgcaaagattgatagccatttgctttaggtaccgcgatataatccttaactcggcctggacgtggcttataaagattatgcatttgccccaaaacgcgataacaatcaccaacatttttcacaatcacacggaacgcataaatatccataatagagtggaattcttgatcctttatgcgcattttttgatagatcttgtaaagatgtttttcacgtccccacactcgggcaaaaatgcctgcgttttctaaccgcactttaatctcttgtgaaatacgttcgattaaatcttgtcgattactccgcgccacatcaacgagtttttttaacacctcataacgatgtggatgcattgcttgaaaagataagtcttctaattcatttttgatatgctcaatacctaaacgatgagcaagcggacaatagatttcaagcgtttctttcgcaatacggcgacgtttatctggtcgtaacgaaccaagcgtgcgcatattatgcgtgcggtcagcaagcttgattaacacaacacgaatatcgcgcgtcatcgccaaaatcattttgcgaaaattctcgacttgtgcttcttggcgagtacgaaatttcaacttatcgagttttgatacaccgtccacaatttcagctacactagcaccgaactcttctttcagttgttcttccgtataaggtgtatcttcaataacatcgtgcaaaagcgcagccattaccgcttcgtgatctaagtgaagttgagcaataatggaggctaccgccacaggatgggtaatgtaaggttcgccgctggagcgaaattgtccttcgtgcgcatctcttgcaatcacaaacgcacgcttgatgagttcaattttatctgcgggcaaatacccttgaataattcgatctaaatccgcaaacagttccaaaggagacctacttatcgttgaaagagaaagtgcagttaaaatatcgtgattttttaccgcacttttaaaagattattctgtaattaatgcaacagctgcttcttctgtttcttgcactttcgccattttttggaattcttgtgcatccataatatcttgattaatcaaacctttttcgatttcacgcaatgcgattactgttggtttgtcattatcttctggcactaacggcacactttggttaagttgtaattgtcttgcacgacgtgcagccgttaaaattaaatcaaaacggttaccaattttttctaccgcatcttgcacagtaacacgagccataatttactccgatttgtcaaaaattactctattgaaagggcgttataatactcaatttcgccctattttgctagtagctgttgaattaacattgcattttgtttttgttgataatctttagttaagcgttccgattgcaaaatactttgtaaatcttttaatgttttctcaaaatcatcattcacaatgacataatcatattcgtcataatgcgaaatttcactcatcgcttttgacattcgttccgcgataacctcttcactatcttgcccacgaccaattaaacgacgctctaattcaggcaatgaaggcggtaaaataaaaatgcttttaacactaggaacttttttgcggatttgttgggcgccttgccaatcaatatctaaaaatacatcaatgccttttgctaaattttcctcaatcgcaggtaaagaggttccataataattgccaccaaaaactttggcatattctagaaataaatcttgttcaatgagtgattcaaactcttcttttgatacaaaataatagtgtacgccttcaacttcacctgggcgtggggcacgggtcgtatgtgacacagaaaccattttttgagttgagctatctgatgccaataacgctgaaattaatgaagattttcctgcgccacttggtgcagataaaatataaagattaccttgagacatagaatatttaaccttctctaacaacttcagtctattatgcagatttctctataaaaaatcatcaaaagtgcggtgattttttacggtactttttcattctaatgatgatttgatatagatcacaaaaaagtagtagggtttatagttttataaaaatgctcgtgctatactctgtgcgttgtcttactgagtgagcagtattactcaaagcaaacagatttgtttaacttaaataaaaggtgaaaatcttatggcaattaaaattggtatcaatggttttggtcgtatcggccgtatcgtattccgtgcagcacaacaccgtgatgacattgaagttgtaggtattaacgacttaatcgacgttgaatacatggcttatnnnnncattccattcattaattaattaatgaatgaatgnnnnncgatggcgtctaaaagcggataacggtaaaatcattgcagatagcggggaaggctataaaaactacactgattgtttacacgctattgacttagttaaatcaactaaccaatcaactaaggttgaaatggcttaattaacaaagctccgaaaggggcttttttcatcacaaatttttaaagagcattgagattgtgtatctcgttttgatgggtttattatgtactttaggttcattgtaattaagaacaaaaagtacacttttttttaaaaaatgtactaattgttcatatttaattgatttgtaaagaaataaattttttgaaatggagtttaattgcttgttttttaaccagtagatgagcaagaatagaaaagtgcggttgatttttgaggtgtttttgtgagtgtaagcaagttttagttgtaattaagcaagtatgatgaaggtggatttttagagagttgcagtaaattgagatggagataagcaagatttggcgaatttaagcaagggtagatttgagtaataaaaaaccgccagaagaggcggtttattgtggttgatatgtctccgacattgatttcggagacatcagatgaggcggcgttagtgcacggtttaaaggttagattgctttggcgaaattaataatttgtttatcttcattccagctaatgtgttgtaacttgaagtgatcaaatgttcgcttaattgtgtccagaatattagctttatgcgctgtgtttggtgtatcaagcgcaaataaaatattctctcttttaataaatccttcttgctctgcgcgattaattttcgctacccaactatcacaatgttcaatcatgctcggactttcaacctgatcgaatgcaagaggttttaccgcttttaaaatatgtttatcttgttggattttcaatgccaaaggaagggcaaatttagcaaaatcaccattcaccatatattgtttgtattgtgcaagaacactgtcgtttttcttgtctaaacaaggttttgtaatgtttcaaaatcacttgttcttggctttctgtttttactccagtattttggataaattgcgtatatagcttgttaaaataatcttgcggatcatccaccatacctaccgcagcattgctatattgaacaataccttcttttacatcaatgtaatggtgaaaaaaagtcgctatatcctgcgcacttccgttaaatggctgattaacgacatattgtaattcatcattaatcgtttcgcggacagtttcaaacattttgcttttatagaaaacatcattcacgcgtttgttatttttaggtacaagttgataagtgagttttttcttttcgggctcgcacatcaataagccaacattgannnnncattccattcattaattaattaatgaatgaatgnnnnnttttatgtgtatccacgtggatacatataaaaaagatttgtagggtgggcgtaagcccacgtggatacacataaaaaagatttgtagggtgggcgtaagcccacgtggatacacataaaaaagatttgtaggttgggcgtaagcccacgcggagacatataaaaaatatttgtagggtgggcgtaagcccacgcggagacacataaaaaatatttgtaggttgggcgtaagcccacgtggatacacataaaaaaagatttgtagggtgggtgtaagcccacgtggagacacataaaaagatttgtagggtgggcgtaagcccacgcggagacacataaaaaagatttgtagggtgggcgtaagcccacgcggatacacataaaaaatatttgtagggtgggcgtaagcccacgtggagacacataaaaaaatatttgtagggtgggtttagcccacctcacggatttaattatgttgaaatggggaaaacaatgtttaaaaaaacacttttattttttaccgcactttgtgcattttcagccaatgcaaatgtgattatcactggcaccagagtgatttatcctgcagggcagaaaaatgttatcgtgaagttagaaaacaatgatgattcggctgccttggtgcaagcgtggattgataatggcaatccaaatgccgatccaaaatacaccaaaaccccttttgtgattaccccgcctgttgctcgagtggaagcgaaatcagggcaaagtttgcggattacgttcacaggcagcgagcctttacctgacgatcgtgaaagcctcttttattttaatttgttagatataccgccgaaacctgatgcggaatttttggcaaaacacggcagttttatgcaaattgccattcgttcacgtttgaagttgttttatcgccctgcgaaactttcgcttgatccgttcgatgcgatgaaaaaagtggtgtttaaagccacgcctaaaggtgtgctggtagataatcaaacaccttattatatgaactatattggtttgttacatcaaaataaacctgcgaaaaatgtcaaaatggttgcgcctttttctcaagcggtatttgaagccaaaggcgtgcgttctggcgataaattgaaatgggtattggttaatgattacggtgccgaccaagagggcgatgccatcgcacaataataacgtaaataacgtagggtggnnnnncattccattcattaattaattaatgaatgaatgnnnnnatggatggatttgatgacgatattccgttctgaaatccatatacataaattatgtaaaaatacatcatagaaaccagagagaagccttataaaataagacttctcttttttttacattaattttgacacaacatctttaatttgatagtatttatatatgatatttttgtaaattaaatgattatgcatagattagaaacagtccttttttcaaatggagaacgttttcctatattggttaatgttaaaactggtattcctgatttttattcaaccttatgggtaactgtagaactacgtaatcaatccgcagtaaacacaattagaaataagctgggaactatacagtgggtaatgaattgggaaaaacagaataatcttgttattagcgatctaattcataacaaagcactcttaacagaaaaccaattagaatctcttatccaacatatgagaataaatgtaaaaaagcgaaagaatgtaatcaatacaaaaaaaagtgtgttaatgaaaggtaggactcaatttattgatatttattctgccgtatctcttagtcatcaatataatagactaacaacgctttcagaatacatattatttctatctaaagtaattaatgtatctaatgaatatattgaaaaattgacgaaactaattacgttaattaaagagtcaagacctaaaaatcataaaacattatctatcaaaccagaaagtgaactacctgatggattgttagatgagtttatgtctattgcgaacttttctaatcctaataatccatttcaagatattggaattagaaaaagaaaccatttgatgtttatcttattaaaggaattagggattagaagaggagagctattatcaattcaaatcccatttattgatataggaacagctaaatcctcaattacaattagacgaacgcatgatgataaatttgacacaaggaagaagcaagctgtaagtaaaacgaaagaaaggcgacttcctatttcacaaaatatagctcaacttatcaatgactatattatgaactatcgctctaagattcctaacgctaataaacatccatatttatttgtaacccatcgaaaaggaaaaacgcaaggaaacccaattagtaccagttcttttgataatgttattgtaccaacgatgaaaaagatagattctaaattttctattattcatccacatatttttcgtcatgaatggaacttagatttttcacgaaaggtggataaaaataatcaaaatgtaaatcatgattcttctcataaagattttatttctcctgaaaaagaagcaaagatgagacaacatcttatggggcatacatccgagaaatcaggaaatatttataatcaacgttatataagagaaaaagctaacaagatattattagatcttcagattcagtttcaaaaaaaggttgataattatgaatcagaataaacgtcttagacagtcaagagatgggtatgtatttgatgaaaatgaaaactcttggcatataagtaaagacaaaaccattaacttttctcaacccatattaaatataaataaaaaaacattagatgggtttagaaaaacattagcaatatatgccgaaaaatactcaagttatcacgtatatcacatgtatcaacaatttcaacgattagtaatttcaactaatttagaagtcattaatgtgccaataatcttggattggaaaaataaactaggaaaagaacatgaatggtatttaggagcattaaagggttttttattgtcatggcatgagtatggctattatggagttgataaatctgttgtgtcattgctagaaagctttacgttgagtggaaatgataaaggtaaatcggtattaatgagatgcccttatacaggagcatttaccgaaaatgaaattttggctttaatggctgaacttgctagactttggagagaagatcttatttcatttgaaacatatgcatatattcacttacttcaatctacagctagaagacccattcaaatacgccatttaaaatttgaagatttaagaaaggaaatctctcaaggaacatggaattattttctaaatatccctagtgccaaaaaaagaggaggattattcagagaaacatttaaaaaacttgctatcacagaggacttatatttaattctcctaaactttatagaatatcaatataagaaattgcttagtttggttgatgaaacctttatttctagttataaaatgaaattaccaatgtttattgattggaattgtttaaagaagaatatcaaaaataggaattttgatctttcattattaaacaaagatatttttcattattctgcttcttcgttggagctatacgcattacgaaaattctgtattcaccaaaaagcaatttcagaacgaacaggcgagattattcatgtaacagcaagacgttttcgccatactagaggaacaaatctaggaagaaaaggggttggggcaacgattatagcagagctcctagatcatacagatacacaaaacgttaaagtttatactgaaaatacagctgatacagtgcaatacattgatcgtgttatgggtgctgaaatgggaaaactcgctcaagcatttacaggtagaattatttctaacttaaatgaaagcgaaagggggcatgatccaacatctttaataaccaataacggaatagatacaataggtgcttgtggtacaaatgatttttgtataactggctatgaaacttgttatttatgtcctaagtttagaccgctcgttgatggtcctcatcaacaaatcttaaataaattgtatgaggaaaaggaagaacgtttaaaacaaaccaaaagcatagattatgcatcatccaaagatcgtattattttagctgttgagtatgttgttcaagcttgcaatgatatgaaaagaactattgggagccactaattatgaataatctaatttttactccacaagataataatcctaaatctaatttagagcaatttattaatttcagtaaaaatcagcttactatctttggaaatgattgctgggaaaacaatcaatggaaaacaacattcagcatttatccagttcaggttcgtttttccacagaaagaattaaatctacagcttataaatatgagccattagctgcaccattcattgaatttgccaaagcctatattcgttatacttattctctaaatcccattcgtaatttagccagacatattgaatctttacgtatagttgaaatggctctctataatattaaaggaaaggctgacatacttcagcttgattatttagctattcatgaagtagaaaatatcgtatcaaaaaagtataaaaaaggtacggaatcagtcaataaattaggctatcaaattcaaaaattatttgatttttgtagagaaaatcaaattacacctcaactacctttatgggaaaatccttataaacgccctagagatttgactatactactggatgataaaggaaaagaataccgttcaagtaaaatgccaactgatgaagaaatgatgctggttgctaaactctttcatgatgcccctaatttagacaaagaaactgaatattatacagctgttatggctctacttatggtcgctccatctcgttgttctgagttgatgtctttatctgtcaattgcttagaatgggaggacgatagcttgggaaataagcaattaggtattcgatggataccagcaaaaaatggtaaagagggattaaagtgggttcctagctgtatgcaagatattgttgttgaagcggttaggcgtttaacaaatataagctccttggcaagaaaagcagctaaatttgcagaagaaaatcctaatatattgatgttatttgataaagatcttgtaacatcccattctttatacaaaaagcctttgactaaaagtgaaatagctgaagtgttagatattgattcccaaaatatctgtaacaccaaatggtttaaaaatttaataagtgaaaacgatggaattataacttatgagatactaggaaaatttttgtataaaaaatacacatcaaaatttaataattggccctatgtagataaacataaaaacgttaaggcttctgaagctttgttattattcagagaaaatgaatttcatgatgacttttcctctaaaagtttctcttttgtgttaccaacagtgaaccaaattaatgatagattttgctattcagaaactcgccctaaaacatcattatgggaaaaacattgtataggtacatctaaaggagaatttattagattaccatcgcataatgcaaggcattggttgagtacaaaagctgagcgaggtggaatggatgaattaactttagctaactgggcaggcagagctagagtggcagataataaagcttatgatcacaggacagaagaagaaaaaagtgaggcagttcgagatttactcattcctgaggatatttcaatattagacaaaattcatttaaatcttcctattacctatgaagacttaggtaaagacagaattggagttgcaacgataacagaaataggtatttgtgaacatgattatgcgatgtctccatgttctcgtcatggtgattgtgaaacatgtaaagagcttatttgtattaaaggattagagtcttctttagaaatattaaagcaacgtgagactcaattaaccgagcaatttaataaagccaaagaacaccataaaataggtgtttttggtgcagatcgttggataagtaacctaggatggagattaacacatataaaaactaaaattaagttcttagaaaatagtgaaatcccaaatggatcattattaagaatgcctgatgagtacgacccttctccagttaaattagctttacaggaaaagggaatggatatagatcttcaaaagcctgaaacagctagattagacgatgatttatatagactaatggagttatagtatgcctaaaattcttatcacagaggaaaatttagaagatataatcatgttgattaatacttgggagggtaaattaacatgggatttactttgttctgaagtttcacaactattgaatattaaaagcattgaaagacaatcactagctaattatagtgatatacaaaaggcttttagtacacggaaacaaagaataaaagaaaactctaaagctaatcctcaaccaaatgtaacgatagattatttgcaaaaacaagtaaataatttaaaggctcaagtacaacgattggaagaaatcaatgagcaatacaagcaaaaattcattgtatggcagtataatgcatatatgcatggaatgacagaagataagctaaataagccacttattgcagttaatcgccagcatcgataaagagataccgtttgaaatttaaatttcaaacagtattttttcaaaaagattatccttctcttcttgggattctatcctccggtgttactgatgttaatttggctaatttcggggctagccattctctgaggtcatccattaaggaataaactacaggcacaaatactaggctcaacaaggttgaggcgattaaaccacaaatgacagcgattgccataggtgctctaaatgccgcgcctgcaccgctggcaaacacggccgggatcattcccgctaccattgcaatggtggtcattaaaatcgggcggacacgttccgaatacggcacttatggcgaaatcgtaaatatgcccgttcacgctgtggtaaaacaccctgaaaacctcacaatggaacaagctgcggcaagttggatgatgtttgtaaccgcatacggcggtttgattgaatttggcaaggtgcaaaaaggcgattttgttgtattgggcggagcgaccagctcggtaggcattgccgccattcaaatcgccaaaatgcaaggggcaaacgtgattgctctgtctcgcacgcacgccaaaggtgatgtgcttttacagaaaggggcggattttgtgattgccaccaaagaagatgacgttacggctaaattactagaaattacaaacggcaaaggcgtgaatttggtgttcgaccctttgggtgacaaagaagcagcaaaaattatcaacgcaatgacacaagacggcaaatacatcatctacggtgcattaagccacgatgatatcgccgtgcctgtgttcccaattttaggcaaacacttaaccgtgcgaggctatgaattgtttgaaatcactaccgtaccagaaaaactcgctcaagcgaaaaaattcgtgtttgacggcttagcaagcggtcaattaaaaccagaaattgacaaagtttttgcttttgatgaaatggcggaagctcaccgttatatggaaagcaatgcacagattgggaagattttggtaaaggtttgattgttttaaggtaaatatgccgtctgaaaaataagtttcagacggcacatcgttattttacctgccgattaagccaccacactagcgagagcatcacaggcacttccaccagcacaccgacctccgttgccaatgccgcccccgagtgcaaaccgaacaaagaaattgccaccgccaccgccaattcaaaaaaattactcgtgccaatcaagcacgcaggggcggaaatttcgtgtggtaatttgagccattttgccaaaacgtgagccaaggcaaaaatgccgtaagtctgtgccagcaagggaatggcaatcagcaaaataatcaagggattggcaataatggtttgggcttgaaaggcaaacagcaacaccaccgtcaaaatcaaacccataatggaaaaaggtttcaggctgcctgaaaaatattccgctattctttttctttaataccttgaataatctgacacttatcaaccgttttattttcacaacccacaaattgcattaaaaaagttttaacttgttgtagttctttgatttgttcgtccaaatatgccaaatgttgctcggcaagtgcattgatttcattgcattgtttgttaggcgtttgttgtaattgcaacagcgttttgatgttacttaaagaaagaccgatattacggcaagttttaataaagcgtaattgctctaactgattttcatcaaacacacgatagccgttttgttgatgtgtaggggcgattaagccttgtttttcataataacgaatggtttccaaatgtacgcctgtttgttcactggcttgttttattttaaaaaattttgacattttggcttgaccctgtaatgactacggagtttatagtatagcaaatttcatcttaaaacaggagcaaaaaaatggcgtgccaaaattgttgtggttcaaatcagcctattcatcaatcgcccaagtacaaaaaagccttgtggattgtcttgatattaaatttatcaatgttttttgtggaaattgtgatgggggttaaatcaggttcaacttcgctgttgtcggacagtttggatttcttgggcgacagtgccaattatttgataagtttgattgttttgccaatggcgttaagttaccgagccaaagcatctatggttaaggggctaacgatgggcggttttggtttatttattttaatgacaaccatttatcgtgtgttttatggggaaatgcccagttattctgaaataagcattgtgggatttttggcgttattggtcaatgtgtcggcattgttgatattattaaaatttcgtgatggcgacagcaatgtccgcagtgtgtgggtgtgttcccgaaacgatgcgattggtaatgtggcggtaattttggcgggtatggcagtttatttttttcaatcaaaatatcctgatttaattgtggcgtttgttttggcatttttggcattacaagccagtcaagaaatcatcaaaagggcttgggcggaattaaaagtcagttaatttaaaacaccgtttggattgatgttcaagcggtgtttttatttttaaattttgcaaaataactttcaggctgcctgaaaaacctacacccctttattccccagcgattttcggtttatccaccacaccagcgacaacatcacaggcacttccaccagcacaccgaccaccgttgccaatgccgcccccgagtgcaaaccgaacaaagaaattgccaccgccaccgccaattcaaaaaaattactcgtgccaatcaagcacgcaggggcggaaatttcgtgtggtaatttgagccattttgccaaaacgtgagccaaggcaaaaatgccgtaagtctgtgccagcaagggaatggcaatcagcagaataatcaaaggattggcaataatggtttgggcttgaaaggcgaacagtaacaccaccgtcaaaatcaagcccatcacggaaaagggttttagactgcctgaaaattgtgccaccgatttacccgatttttgtaaataagagcgggtaagccagcctgccagcaagggcaacagcacatataaaaccgtgcttaaaatcaaggtattccacggaatctctatgtcgcttacgccgagcaatacgcctgcaatcggagcatacgccacaatcataatcaaatcattgaccgaaacctgcaccaaagtgtaattggggtcgcctttgaccagttgcgaccacacaaacaccattgccgtacacggtgccacgcccagcaaaatcatgccggcaatgtattcttgtgccgactgtgcgtccacccaacctgcaaaaaacacccgaaaaaataaccagccgaacatcgccatcgtaaacggcttgaccaaccagttgataaataaggttaaaaataagccctttggttttttgcccacgtctttgattgccgaccaatcaatctgaatcatcatcggataaatcatcagccaaatcagtatcgccacaggcaaattcacatgagccacttccaaagatgcaacccattgaaatacattgggaaaccaaacacccaaaaccacgcccagcacaatcgccaacgccacccaaaggcttaaaaaacgttcaaacaaacccatgatttactccttatgattaataatttcgccgtcttctttgacaaacggggtcgcaaaaggcggtaaaaatgccaaaactgtttcggacggacggcataatttcacacctttttcactcaccacaatcggacgattgattaaaatcggttcacgaagcatggcggaaatgagctcgtcatcgcttaatttttcattttgcaaatcaaacgtttcatacggaggcacattggttcgcagcaattggcgaggcgtgatgcccatgcgtttgattaaatcacgcaaagtcgtttcacttggcggatttttcaaatattcaatcacttgtggctcaataccagcgtggcggatgagtgctagtacattgcgtgaagtaccgcagtttgggttgtgataaatggtgatgttcatagttactccaatctttcaagaatatagaaatatttggcaataatttttcaggctgcctgaaaatcactggcaagattcgcctgtttgagaacagcagttttgggtcagaaaatgggtcaatgccatcatcaaatccagctcggcaaaataacgcatgtgccgtccttcctgcaccacacgcacaagccccgaatgcaacaggctttttagatgaaaagacacattattcggggcaaggttaagctgttttgccaagtcgccagcaatcatgccagtactgcctgcggcggtaagttgttgaaaaatcgccagtcttatcggagaagacaggctctcaaagagtttgcttgcttgtatcgtattcataggcgtaattataacaagaaatttcaatatttcaagtatgattgaagtattttttaattgcccgaagccacctttccaaatacgaaaacccacttcccatttttcgctattcttatcctaatttcaatacattaaaatacgctcattccatttcataaataaggtaaaaaaatgaccaaacaaatccaattcacccaaacaggttcgcctgatgtcctgcaaatcgttgatgtacaaatccccgcccaaaatcgggcgaagtgcaaatccaaatgcacgctttgggactaaaccgtgccgagatgatgtatcgagtcgattgattagcaagttttggcaacatcccattaagcgataaacctgaaggcattgcctcagttggcattaggccagtaggtactgaatgcatcatcgccatattgccatgttgtgcgtggttcatcatattcgcaaggctataaagcgagctactggctaagctaattccaattccataacgtaaaaaatctcgacgtttcattctttcctcccccctattggttataggatttaaacacttcactttcaccgtttttcttaatcaaaacaacatcataaggatctttgcgtccgccgtatgcttcaccgtccatacctggtgaaccaattggcattcccggtgcagacaagcctattgcatcgggtttttctgcgagtaaacgtttgatatcctcagcaggtacatgtccttcaatcacatagccatcaatcacggctgtgtggcaagaagcatgttcatatttaatgttaaagcgcttatgagcatcataattgcctgtttcgttgactttaacctcaaaaccgtttttctgcatatagctgatccattcattacaacagccacaagtcgggcttttccacacttccatagaaagtgtttgtgcttgagcaaaagcggttatgcctaaacttaaaagcaacaatgagcgggtgaatttatgtaatttgcaaatttttctcaaaatcctaccgcttgtttttcaatatgtatgaaatctttactataatacagtctcattactcaggactaataatgcacacattccatcctcaatcgcttgtctggacaagagagccgcaagcttttgaaatatcagaaaataaaataaccatcaccacaatgccacatacggatttaaagcagtcaatgtgtttttgcgtgaacaccccaatttaaacattcattaggtataataataaaaaccttaaacagaatatcatagcaaaatgaatttaaaaccagttaaaaatcaaacttcccaatacgaagagtgggcaagagaaaaagtcaaaaaagctatatccccaacctgaagaacggggctttacggcgcaaaaatggtaaatttgactggttaaaaattgaaggcaaaataagttattttaatttgcaaacacccaaatcctgcataattttgaagattttttacaaattattcatataacattgttttatattgtaaaatttttaagctgtgttgttacccatcaacactgctttcaattattttttctttttcgccaataactcatcaattaaaccattcagcacttcccgaatggttacgccctgttccgccgcatatttttttagttcacgatgattggcttctgtcatatcaaagctaatccgcttaatacgctcttgctcgctgacatcagcaacagaaagtttgcttttagttgcgcttgggcgacctgctgttaatttattcatttgcatatttccttatttatttaaaacattggtggtgtcctgaaaagtgtgctgggttaaatttgtttgggatgattgattgcctaaaatccaatattaaaagatttaacatgataaaacattgatttggaaaaacagcaactgcgtctgacggctctacttaatctgtgccgaatccgacagttattaccctcaatcgctttagtatgttgcttacccatccattggtcaccggtatcagaaaacgcatttacaaaagcatcccaattatcgccggcaatacgttcatagcttactttgagtgcttttaaacgctgctttaaagccaaagcggtttgcaaatcacgtttgccccaaacaaatgccatgatttcacttgtcttggcatgataaccgatgtagatacggtatttttggtctatccgatttggtggtacaaaatgccaatggcgctttattctttgctcgagcaagtagactttagtgggaaaaatattgtgccggtggttggtcacggtggcagtcgtttgggtggaacggataaagatattcagcaacttcaaccacaagccaacgtgaaaaacggttttgaggcgtatttgcataaaacggtaagggctgaacaacaagtggaaaaaagattagctaaattcttaaccgaaaatggttatacaaaataaaaatgtaggggcacacagcgtatgtccctaccatttaaatttcaattttatgaagaaaaaatatctcctccaactcgctcaagatttggttctaacggcaatattgctttctctttttggctatcatctttatgaagaaatcacgcacgaatggctcggcttggtcttttttgctttgattatctcacatctttcactgaatacatggtggctcaaaaagaccttttcaggcagttataacagctatcgcattttgcaaagtgcggtcaattttgcaacttttttgttatttttaaccgcttgtatcagtggcattatgctttctaaacatctattggtggaaatgctattccactctaccacagatttaatgtgaaaaattcatatgaccagcacccattggttgcaaattttagtgggtgtacatttggggttacattggaaacctattgctaatttattcgcaaatggctagatagaaacgatcttatactcgccacaattttattaattaaggatagccaaatatgaagaaaattaatgttgccattgtggggagtgggtattctacccgtattttccacgttcccttttttaaaaatgatcatcggtttaacgtgataaaattttttgagcgttcaaccactcgggcattagcatggttccccaacattgatattgtgtcaaattttgaaaagttactgactgatgaggtggatttaatcgtgattagtcaataagtgtaaaaatggcataatcaactcaatgaatttatggacaaatattatctgtttggtattttatagtaagtacattgtgtaaaaataaaatctgaaatctagtctttttattctttatttttacatattcacacttcaattttgacaagttaatatttaattgattgattttaaagccattttataatttnnnnncattccattcattaattaattaatgaatgaatgnnnnncaccctacattattattgatatgacattgtgaaagtggcggcggctttaacttttccttcggttaaagcacctcttgttgtgtcttttacgtaatagactttgaaggtttcttcagcactttgatctccgccagcaggggatggttgtttttttaattcaaattgtccatgattattcatattggctgaatcaagtccatatttaaccgaatcgccattaccgctatcacgtttgatttttaagctaacgcctgtggcttgtccggtgcctgtttgggtgcgaagtaattcatttgttccatcattcattgtaccatcttcgcccctaaaagtaactttcactacaggaaataaccatttgccgttaaatttgttatatgttgtatcctcacagttcactcttagcttaaattgtccaccttcaatttcagtgtttgtctcaaattcacgttttttaacactttttagagtgactggtatttttttgtaagtactattcaagatacattggcgttgttgttggatgaagtaaatttttggtgtcttaagttgcacattaagtgaaccaacatcttgaactcgatatgatacttttgtacgtccccaattatttattccccaagattgcaatttaatttgaccaagattaagtttcattgtaggaagctctgtattttcagtaggtaatttaagtaagtgtaattttgctcttactttaaatgatatatccgctgcatcaccaaaataaatttgtaaagtggttagtaaaaaatcctcttgttgtaaattacttaaccatttaacatcttcaataccttttttcattcctaattgaaaagaaacaccaagctctggatgttgacgtattttaaaaataacttgattatcagcactccgcatcgacgtagcttctaatattgcactatcaagataaaatcgtaagggcagttgcatttgcgcgcaagggttagatacacaactaaatcctgcaaaactataacccgtatcgcctgaaacagtggtatctatccaattattaaataccgaccattgctggacattattggaatatgatggatcaatgaccgtattgtctcttgctttagaaaaaaggatctgttctggtgtggtagcagaagcaatcattgtagaacttccttcaaaagtataagtaataattctatttattcctgaaaatccgttagtaaattttgcccttttgatcgtggcttctgcaatattccccattaagaaacaaaataagaatgcaattttagagatgggcgtgaaatactttgcgtatgttgttaaagttttcattttattctattgcctatgataaattagttatactgcacttgaaaagttgcagtggcttcaacttcgcctgcggtggcggcacctgtggcgtaataatgtgcgaagtagtcaaaacggggttgaataactgtgctgttttgctctttgcctgtgtcgggggctttttcgctgttggcttggctgccgtctacgttaatgggcgagcctgtgccatcagctttgacaatttgaatgccaacattgttggctttgccgctgcttgcggcattagaaagataaagctgaccttttgttactgccccactaaatagcagattggcttttttagcatcggctgcattacactcttttagcgtgatagaaaaaggcacgggggcggcggtttgccctgcaaggcttaaattggctttgcccaccgttggcagggtaacagtgcgatttttgctgtctgtttcaattttacaagtgccatcacttacaatctccccttgaaaggtcactctgccatcaacggcataagcaggcagtgccacaatgcaagcaagcaaagccagacgatgaagcctaaagcattttgagccactataatttgagccactataattcgagccactacaagaagcggtggattgttgatggcaaagtgcggttaattttttgggtgttttttgcataaatcctcttcaattattctgcggttttgcattgaatatcgtggttttgtatttgtgcattatccaaatcaacttgatagtggaagcggcattgttcgctttctcgctcgccccatttgacgattaactcgccttttggctgggtaagtttattagcgaaaagcacgcccccttgcaccacatcgcccacaaatgccccttcgctatcttgtgcggtggatgccattggcactggctcgccatttggcaaagtgaggttaaataacaccattgtatttttgcccgtgcggaaatccactaagctaattgaatttgcacgaggaataatttggcgttcagtggcttcaaattccacattcgcctctgcatcagatggattgataccaatataattgatttcatatgggctggtgtaaggcacaaccgcattgccgaaataatcaaggctgacattggcacctgattccacttttgcccctgcagcatctttagcgtgaataatggcaaagctttcgccaacaggttggcttaaggtaataccgtatttgtgtgccacgacagcaccacttgcgcctaatgaagtagagcgatttttgaggctgtcacgggaataagaagcacgatagctaccaatgctattgttatgtgcaaggtttgcgtcataactgcggtagccttgattattgcgtgaagcgttaatgccataactccattgatgacgttcgccaaaagagccatttacgccaagtcgttggttaatgtcgttaccgctgcgagaataactactgtctgcagaatggttatcgcctaatggcaggctgaggcttaaataaatgctgttgtcacgtttgcctgtttctttatcaatactctgtgagaggtttatagagtaattgagaatatggaaacgatttgcataagccagttgatattgcgtattcgtgccacgtttttcccaataattataggtttgccctgaaagataaagattgccccaattccccagactttgacttaaactcacttggaactgattttttgggcggtaaatttcgggtaaatacgccccgctaaattgtttaaaggtgcggttaagaccaatagtatcgcttaaggtgtaaaaatcacgggaagaatatcgataggctgccaacgtgagattggtgccaatttcgttgaagttaatgctataactgccgtgcaagctgtagccgtttttgctgacttttttcagcggaaattcagcatgcgaccaagtggcatcggcagaaaacgccccaatcggcgtgtttaatccaaaaccaaatagccctgcacgataatggcgagtgtaaagcagacttgaattcagcgtgagatgattagttaaaccatattgcaacacgccttgtaacacccgttcatcaaaggttcggctgtcaatgcgataacgtccaccagctaattgataacgcaaatgccccacacgcattaacggggcaaggttagaaaacggcacaataaatgaccgcactttgccatcgctttcttggatttccaccgttaaatcgccactgtaaccactggcatacaaatcgttaatcacgaaaggccctgcaggcacagtgatttgataaatcgtatagccattttgtttaatgctgactttggcgtttgtgtttgccacgccacgcaccacgggggcaaaaccacgttgtgatggggcaagcattctatcatcagaagcaatacgcaaaccacgcagaccaaaactttccccaatgcgggcagtgctgaaaaaatccccaacagtgacattaccacgaagcagggcgaaatctcgttgtaaataagtatcgccacgttcgtaatgatttttgcctttatccgtaaaacctgaactactgtggttttcaaaacggctaaaactgccattatgccgcaaagcccaattgcctaaattcacaccaccccgcaagcccacatacaaacttttagatttcacttcaggattaccagaacgataatagttgatatcgtaatttgcagaagcggcattggtgccagtttgccagcgagacggtgcaatatagcctcttgggcggcgaatggttaatgcttgaggaagctcaagtttcaatttcatgtcgccaccttgataatcaaaggtgcctttaggaatagcctcagaagcaaaaacacaagtgtcatcttctgcattgggcgatttcacaatggcttcatccatcaaatccagcatttcttgaagtttaggcgtaaagcataattcagcccgacctgtggcaggattatcagcaaaaataatgtcgctttcgcctttttcttcattatttacatagatttgcgcttcataacgccctggtaacacggcattttttacattaaatcgagcaaaatcaatgcccaacaccgagccgcctccccaaagagaggcatcaaattggtcttctgcccacgccacaggatttgccagtagcaaggtgcaagcaaacgcaattttatttaagggaaaattttttgttttcacgaattaaaattctcgttgtagtgattgtagggtgggcgtaagcccacgcagtggctgtagggtgnnnnncattccattcattaattaattaatgaatgaatgnnnnnaggcaccaaatgggcatgcgatgtttacgcaaataacccgagaagaagccaaagaaaaaataaaggcaatgtcccaagctatttatgacggcgaattaaaatttgagattcacatcccagaaaatccgctttcaaaactagcaagattagttgcaaggataatcaaaaagtttacttaagtcagtgactttcatcacaaattttaaacaatttggttaaagaaactctctcggcggaagcacagacggaagcccaacggtgctaagcggtcgttagattgaaagccctaacctacttagttaagagtgagttttaaagtctgcccatgcaaagccagtgaaaaacggtgcagttgccgaaagtggagctcaagcaggcgaatatcccaatgtggatatttcaaaacacatttgctagtacagagacacaacggcatgtgaaaccgttgcgaatgatagatgaagtgtgttttgaaatggcagacaaacgaggaatgctacaatggaaaaattagaaattaaagtgtaatcacagccctattctagacaaaatcagcatagactgattgcactactccactgaccgctcgaaagggcggtatttttttaaacatttgacaccgcccccacttcggattaagataccctcactttcaacagaaagtctgcagccacattttgtggctttttttgtactttacttagaggggaccaaaatgaagataaaaaagaacatcaagaatggattaaacaatacgccaaaagtcataaccttaccgaagaagctgcgttgaataaattgattggtgacgtgcgcgaaacgcaagaaactgaacgagtgaatttacaacagcaaattatcgaaagattaccgcacttaaacctcgaacaaatgcgtgaaattcgtcagcgtgttgagcagttttacccaacgttctttcacgttttgtcagaagcaattaaaaaataatttcgctttacaacccaaaattcttatattactattcgctctaaggtctcaaacctaaaactcaaggcggatagttcactaatcgccacaaggcgatttttttatatccgtaatcctgactatgtcgggagggcgactaatacaataccgaaaggaaatacgtccagccctaccttgagtgggtttttgagcctcccgacgccattctcaaaaatggcttgttttaaacaaatactcaaggattacaatatgtcaaatcttactatcttcaaatttgaaaacgctcctgttcaaaccattgtagaaaacaatgagatcttttttagagcagctcagcttgcagagttattgcaatataaaaatccacataaagcgattaaagatcacgtagatcctgacgacctaacgaaacgtgaggtcgtcaataccatcaataaacgtgctcaagttctcttcgtgaatgaaagcggaatgtattcattagtcttgagttcaaaattagagcaggctaaaaaagtaaaacgctgggtcacttctgaagtgttaccggcaattagaaaaacaggaaaatatcaacttcaaccacaacagctcgccttgccagaacctgaaaaattcacgcacgagctcaccgaatttgaaatagaaacgctcgtttggctccttagaggacatcaccaaatgaacaccctactcgggcaacttgaaaagccacttgacgccatcggcagcaatctacaccccgctgtgtacagctactggaaagaatatggccgccaatacaaagatgcactcccaaccattaaacgcttaatggcacccttcaaacaatcaaaccgtttgaattgggcacgtgcacaacaccttataaaccaataaaacatcacaaaatccgaccgcactttacctcaagaaatccgtgcggcggattgctacaccctaaattcactaaatcgactaaaaaggaaacaaaatgaaacattcaaaaaccccattacgccaagaaaaacaaagcttcacacattttatgaaaggcagtgaaaaatggctaactcgaatcagctattttctcgccgccttggttatcgccctaattgtgggcgggattagcctacacgccaatgccaaccccaccgactggcacgacaacgccctcagcgaacaaatccaacaagaagaacgcgcgagagcaaaagcccaatggcgtgaagaaaattgcatctatcaagcaaatcttaccccacaagttaatgccgatatgtatcgttatgtcgagcaaaaacaagcagaaattaaccgcactttaggagaaaaataatgaaaatcgaaagctacaaaacacaaatcgtccgcaccaaaaacggaagttattttggcgaattatgggtgaacaataagctgtaccaaaaaacttcctattttgccaatgaagccattgcaaccttacgcctaaataaacgaatcgaaaattttaatgcaatggaaaacaccaatattccgccttatcaaaaagatgcggaaactaatcaatttactgccacaccgaagaaaagtgcggtcgaaaaagaagtggtttcaacaaaaccacaagcccctaaaacagaagcgaaacctaaaccgactaccccacgtcgcaaacccttcacgccctacggattaaacggctattttgtggataaacaaggcaatatccgcctacatttagaccgaaaagcacacgcacataccattgtgctaaaccctgaaatgttctcaatgcttgccaatatggtacaagccacacaggagcaaaacaatgaaaccctacgctgattactacgctcaactcaatgcggcacaccaacgtaaagtggattggcaagctggctatgaaatcgctttagatgaagtcgccatggaaattgacaatgatttacaacaaggcgaccaaacgcattatcacgaactcacggaaatgctgtgtgataacgataatttctggcttgctattggtagtggtgcaagttatgagccttatagacaagaggcgattaagaaaattgccgagcgtgaattgcacgcaagaatgaatgattatgacccagattaatggaggggcgagatgacaaaccaagtccaacatcaacaaaataaacagccacttgcacttaaaacattttttgaaagtgcgaatgtgcaaaataagattaaggaacttgttggcaaaaatgcggcaacctttgcaacaagtgttatgcaaatcgccaatagcaatgtaatgcttaaaacagcagacccaatgagcatttttaacgcagcttgtatggcggcgacactaaatttgccactacaaaatggcttaggctttgcctacatcgtccctttcagaaacaacaaagaaaagaaaaccgaagcgcaattccaaattggttataaaggttttatccaactggcacaacgtagtggtcaatttaaacgcttagtcgcattgcctgtgtacaaaaagcaacttatcaaaaaagatttcatcaatggttttgagttcgactgggagcaagaacccgagcaaaacgaaaacccaatcggctattacgcctattttaaactggtaaacgatttttcagccgaactctatatgagtcacgatgacatcgtcaagcacgctcaacgctacagtcaaacatttaaaaaaggctatggcgtatggcacgataacttcgaggcaatggcattaaaaaccgtaactaagttattgctatcaaaacaagctccactctctgttgaaatgcaacaagccgtattagccgaccaagccgttgtgaaagatgtagaaaatcaagaattcaactacaccgacaatattcaagaggcggaatttttagcggttgttgatgaagccacattcgaacaatgcaaacaaagcattgccaacggcgaaaccaccctacaagaactttgtgatagcggggcttatgagtttagccaagagcagattgcggagttggaggcaattgagaatggaaatgtaccaactcaaagctagatgctctggcttggctgatttaatggtaaagcctaaaagcggtaatggaatatctgctacagcaaaaagtgcggtgagaaagatagttaaatatgacctgtttggctatcaagatttcgaaggcaataaatacaccgagaaaggtatcgccctggaggaacaagccattaaattaagcggtcgcaagcgtggtttacctcttaaaaagaacacggaaagacgtgaaaacgattggattacaggcgagtgcgatatttatgtgccaagccgaagattaatcatagacactaaatgttcttgggatattggctcacaccctttttttgctgatgaggcggaagaaaaagcgaaaaaagctgggtatgacgcacaaatgcaaggctatatgtggctatgggattgtagtgaggcgcaaattgattttgttctcctgcctaccccttatgaccaattatcaagctatgacgacccaagccgatacattgacttggttgagcaaatcccccaagaaaaacgtatcaccaccgtcacaattaaacgtgatgagaaaatcatcgagaaaatcaaagagcgagtagaaattgctcaagaatattatcaacaactcatacaggagatgcgctaatggcacgtaataccaacaccgtgatattagtcggtcatttaggcagtgacccagaaatccgccaattccaaaatggcgggcaaattgccacatttaatcttgctatcggcgatgattaccgagataaacaaggcaatacagttaaacgtacgcattggatacctattgtggtgcatggcaattctgctgatgtagcaagacaatatctgcaaaaaggctcaaaaatctgtgtaacagggaaactggtacaggaaagctggcaagaccaaaacggcaataaccgcaccgcacttaaagtagcgacacaatcctttgaaatgctagacagcaaggtaagcaatgaaacgcaacagccaagcaaaaacaaagaaaaacccgatccattaagcgcagcagcagaacaagatgggtttaatgatgatattccgttctgaaatccatatacataaattatgtaaaaatacatcatagaaaccagagagaagccttataaaataagacttctcttttttttacattaattttgacacaacatctttaatttgatagtatttatatatgatatttttgtaaattaaatgattatgcatagattagaaacagtccttttttcaaatggagaacgttttcctatattggttaatgttaaaactggtattcctgatttttattcaaccttatgggtaactgtagaactacgtaatcaatccgcagtaaacacaattagaaataagctgggaactatacagtgggtaatgaattgggaaaaacagaataatcttgttattagcgatctaattcataacaaagcactcttaacagaaaaccaattagaatctcttatccaacatatgagaataaatgtaaaaaagcgaaagaatgtaatcaatacaaaaaaaagtgtgttaatgaaaggtaggactcaatttattgatatttattctgccgtatctcttagtcatcaatataatagactaaacaacgctttcagaatacatattatttctatctaaagtaattaatgtatctaatgaatatattgaaaaattgacgaaactaattacgttaattaaagagtccagacctaaaaatcataaaacattatctatcaaaccagaaagtgaactacctgatnnnnncattccattcattaattaattaatgaatgaatgnnnnngcgtattagtgattttacttttgtggcggagataaatccacacaagagaaagatattaaacaagcaaaacttctcgcacaggagctaggattatgactgaacaattaaaagactttgatgtggcagaacacctcatttctgaagaagaaattcaactttaccttaatgaaattctacaagaagataatattgagcttattttatcctcccttggcgacatagctcgtgcgcgtaacatgagccaaatcgcacgtgatgcagggataagccgagaaggtctttataaagccttatctggcacgggcaatcctacttttgctactgtaatgaaagtaatgaaagccttaaatttacagttccaagttcaacaatctcgattcgcctaaaataaatgcggtcaaaatagaccgcacttccctaccctaaaaacatgaacttaatcttcgccccagtaaatgcaccttttaggaatcttacgcccttagcacgctcacgatacatacaagcaggggaaatatgacgtgcggtacaaatatctcgttcatttgcttgctgaacgtatagcgccattaaaatttggtattgcagcaaactatcctcgtgaaggttcataatctgctcctcaatttttaagcattcgtcatcagttaagaatcgaatgtgagccttgcgcacggtaggtaaaacaggaatagaaattgtggtgcttgggtattctgtgccaattctgtctctaccccagcaattaccccactttaccaacactctctcaacgctatacgacattctactctccttcctgctctttaatttttgccttgtaatgcttaataatcgccttacaatcttcaatggtgtatttcttcggttcgtggtcttgccgttctaaccaagctaccttatccgcaccgattttattgacgagattaattcgatattcgatgatgtttccgctcttgtgatcattacagggggcgcattgtttatgtacgtttagctcacaaaatcttaattcagggcaggctccgacactgcgataatgcccggcatggtattgcccttgatgataccgaccgcaactgatacagggttcatttttatctcgcaggcgaatgaatttattaaataccgcttgcgtctctttcaaccattctgaacgactttttaatttagccttacgttccctttgctttttcttctctgctcgttcctgtgctttttgcgcattatctcgggctaatttaatcgcacattcaggcgagcaaactttctgtgtcgaactaaaggtttttacaaacgctttgccgcagactttgcatttggtttctttaggtttgctcatacctattctctataaatggctttcttgttggtgcgacttgctggatagcttacttttggcatggttgctacaaaatctcctttagctgtattcgctaatactgttgttattgccgccgctataatatttttaccgtgatcaacgcgtcctattatttcagtattcactactggtttagtgcgttcaaatttttctttgctactcatcatcagctccgcatataaaacaaataatcacagttgttactacaaacaaaacaatcgctagggctatttcttctctcatttagtgcctccaaccatcactaagaattacatcgttttctgctgcccacgcttgaacatattcgataaggcttgctaatcgttttacgctcatttgagcggtactttctcgtaggttgattacttcaccctctaatccgattaccatttcagcctgtccacctgttgcaattttgtgagccgataccataatcatcttccaagtgtcaatgtctcgctttttaccgttaaattcgcactgttttgatatatcgcttagtagtgcgtgaagttttgagttctgctcaagtgagcgtgttatcggttggatttttacgaccaacggctttttatcgtctgttggcagctctttgattaaatccaagcaattatttttaatgcgttgatcacgtaaaaagaaaggtttgtattggctcataacatcattcccaacgcttaaataacatcgcaatactcattctttgtactccacgcctaaatcttccaacccaaaataaccgcaagattttgttcgatttactgcgctgaatttacttacctgcggaaacggtatcggctctattaagtgaccgttacagcgaaaacgatcgtcctcccattcgctgctcgatataaaataatctggcgtataaaaatcctctaattccgcaccgcactttgggcatttatagcttgtcattgcaatgcccctttccctttcatcattgccatcaagctatcgcgcgccttatcagccttcgctttatcgtaaaaacgtggctttgttggaatcattttcggaataccctcaaaaggaaaattcgaccgcactttttctgccgcttttgtgagtaatttcggaatagctttcaacgtgtcctcttccgattttttcttgcacttttcgtacagatttttaagcaaccaaaattccacttttgaacgatattgaaattcatcccgattgaatcgggcatagcctaagaaagtgttataacgttggtataattccgcttcattcggtaagcccaatacgtggtagtccagaactttgcatgcttgaataaattcgcctacacttggcaaatacccatttggcttagcacgcatttccgccatacctcgtttgacttgtgttatttttgtaattccattttcagcaaagcctaaaatccactggcgttttactacctgcaatcgctctggggtaaggttaagcaactgagggcaactagcgcaaagttggtcgaacaacgtatcaataaatttctccacttgtggtgatacaccttggtgcaatgattgattagttaattggttcacagtacattctcccagtcttcaggacgattccacggcaacgcatttttttcttcaaaactcattttttgtgcttgggatgttcgcagcttctcatcacgccaatcccaagatgcgttaaatccctgccaattgcgttcgatgcaaatctccaccacttcacaaatcgaaattcctgctttgtccgcttgtttttgcaaacggctaagttgcgtttcgctaattgcccctcgcttggttttacgatgcgtaataaaatctttagcaagctgtcctgttatgccaaaccgctcaagcaaaatttcagattcgcttttttgcgtagtttttttaggttcattgactggttctaaagagtgactggttatgggtgcaaatttttcactaccccctagtgcaaatttttcactacctagtgaaatattttcaccccctagtgcagatttttcactaccctgctcaaggtgtaaaagatataaatttgcacttgaaccatctttattttttcgcgcttttttggtgaccaatcccattttgattaaatcatcaatgtgactaatcgcgctacgttttgacatttcgcatttatcggcaatgtattgataactaggaaaacaaattccatcatcattggcattatcagctagttttaaaagcacaagttttctagcaggattgccaaccttacaattcattgcttgaaccattaatcgcatactcatagcatcaactccgaagcataacgtgacgcgataaattcaatgcctttgcttgttacacgcgtctgagtgtaattgtgaccgtgttcagcagtacctgttttaaccgtaaaaagatctttcgtgtgtgccgattgataaggcaaaagcacgcccgattgacgatacaaatatttatcttccaccaagcgattgaccaatgcacgctcaggtattttcaaaatcttcgccgtctcacgaaatgatttactcgtccccacttccacatagtgatcaacaaaagcgactttaggcgcattacgctctttttctgcttgtaactgagcggctaacatcaatgcctcagaaaaagattgcggaataagtgcggttggtttttgtcgattttccaacgcttgccagcgatcgaccactgcggcggtaaattcaggcgataagcgagcgacaacaacaaacgtatcccgcttgtttaactcatagtaatcaaaccattgatttctatactcaaattttagtggctcaatttgagcgactaaattttgttcaatcaaatcacgaataacacgtaatacatttttgtgttctttatgtgtaatctccgcaatttcccgactactcatcgtcaaaatacttgcgttttctttcgtaatcgttaataagagcgtaatgcgcctaaagtcgcttttgttgatcactatgtggaagtggggacgagtaaatcatttcgtgagacggcgaagattttgaaaatacctgagcgtgcattggtcaatcgcttggtggaagataaatatttgtatcgtcaatcgggcgtgcttttgccttatcaatcggcacacacgaaagatctttttacggttaaaacaggtactgctgaacacggtcacaattacactcagacgcgtgtaacaagcaaaggcattgaatttatcgcgtcacgttatgcttcggagttgatgctatgagtatgcgattaatggttcaagcaatgaattgtaaggttggcaatcctgctagaaaacttgtgcttttaaaactagctgataatgccaatgatgatggaatttgttttcctagttatcaatacattgccgataaatgcgaaatgtcaaaacgt

SEQ ID NO: 3708 - protein, 276 aa, Haemophilus influenzae
CGSGGGDNTQLVSPPKPAEQSKPAEQSKPADQSKSVEQSILGMPERLPTNTGLAFSIKTEDEGNINTIKNEQELIATNNFASINVDGKNIPIDFKLEPSQGWTKEGAFIEELNLAPHICCGKYTDVRFGAIASHSFGQDDILFYNGNPSNSVPESGEVTYKGESIMADKGNSVFGGYRKGTSEFKVNFGDKKLSGSLNVDSPKYDVESGESKFNKVKVDINADISGNKFYGSAKSSSFVSEAVSEGKFYGDGAKELGGMVKAKDNSWVGAYGAKAQ

SEQ ID NO: 3709 - protein, 225 aa, Haemophilus influenzae
CGSGGGNGMNNNTTSQVTGKTGAMYTVSLTNDNKIGTVTKTPLNNSDINSLNLDSASTQRINEAMNKISEEFKSKTGLDVVTGAAIVSNGEKFHIIYNGNPTETMPVQGSIHYKGSAVLGGWSADAPLSIEKGTSQFDVNFADSTLTGTLNVPNFSLVSISASVSGNSFSGRATSPDAPDGAVVEGKFYGKDALGLSGMLKTNTFTDNFGGAGIFSAIDETKITQ
